(19) United States
(12) Patent Application Publication
(10) Pub. No.: US 2026/0201370 A1
(43) Pub. Date: Jul. 16, 2026

(54) COMPOSITIONS AND METHODS FOR TARGETED EPIGENETIC MODIFICATION

(71) Applicant: Mammoth Biosciences, Inc., Brisbane, CA (US)

(72) Inventors: Yuchen GAO, South San Francisco, CA (US); Alex Tianjiun WEI, San Francisco, CA (US); Kelsey Nicole DOCOUTO, San Francisco, CA (US); Aaron DELOUGHERY, San Francisco, CA (US); Wiputra Jaya HARTONO, San Francisco, CA (US); Benjamin Julius RAUCH, San Francisco, CA (US); Stepan TYMOSHENKO, Sacramento, CA (US); William Douglass WRIGHT, Fairfield, CA (US)

(73) Assignee: Mammoth Biosciences, Inc., Brisbane, CA (US)

(21) Appl. No.: 19/385,214

(22) Filed: Nov. 11, 2025

Related U.S. Application Data
(63) Continuation of application No. PCT/US2024/028769, filed on May 10, 2024.
(60) Provisional application No. 63/501,872, filed on May 12, 2023.
(60) Provisional application No. 63/510,678, filed on Jun. 28, 2023.
(60) Provisional application No. 63/586,712, filed on Sep. 29, 2023.
(60) Provisional application No. 63/597,841, filed on Nov. 10, 2023.
(60) Provisional application No. 63/624,457, filed on Jan. 24, 2024.

(51) Int. Cl. C12N 15/11; C12N 9/10; C12N 9/22; C12N 15/86; C12N 15/88

(52) U.S. Cl. CPC C12N 15/111; C12N 9/1007; C12N 9/226; C12N 15/86; C12N 15/88; C07K 2319/81; C12N 2310/20; C12N 2750/14143; C12Y 201/01037

(57) ABSTRACT

Provided herein are compositions, systems, and methods comprising effector proteins, and uses thereof. These effector proteins may be characterized as CRISPR-associated (Cas) proteins. Various compositions, systems, and methods of the present disclosure may leverage the activities of these effector proteins for the epigenetic modification of nucleic acids.

### CROSS-REFERENCE TO RELATED APPLICATIONS

[0001] The present application is a continuation of International PCT Application No. PCT/US2024/028769, filed May 10, 2024, which claims priority to U.S. Provisional Application 63/501,872, filed May 12, 2023; U.S. Provisional Application 63/510,678, filed Jun. 28, 2023; U.S. Provisional Application 63/586,712, filed Sep. 29, 2023; U.S. Provisional Application 63/597,841, filed Nov. 10, 2023; and U.S. Provisional Application 63/624,457, filed Jan. 24, 2024, each of which is herein incorporated by reference in its entirety.

### SEQUENCE LISTING

[0002] The contents of the electronic sequence listing (MABI_038_05US_SeqList_ST26.xml; Size: 2,811,137 bytes; and Date of Creation: Aug. 14, 2025) are herein incorporated by reference in its entirety.

### FIELD

[0003] The present disclosure relates generally to polypeptides, such as effector proteins, compositions of such polypeptides and guide nucleic acids, systems, and methods of using such polypeptides and compositions, including modifying target nucleic acids.

### BACKGROUND

[0004] Clustered Regularly Interspaced Short Palindromic Repeats (CRISPR) and associated proteins (Cas proteins), sometimes referred to as CRISPR/Cas systems, were first identified in certain bacterial species and are now understood to form part of a prokaryotic acquired immune system. CRISPR/Cas systems provide immunity in bacteria and archaea against viruses and plasmids by targeting the nucleic acids of the viruses and plasmids in a sequence-specific manner. While CRISPR/Cas proteins are involved in the acquisition, targeting and cleavage of foreign DNA or RNA, the systems may also contain a CRISPR array, which includes direct repeats flanking short spacer sequences that, in part, guide Cas proteins to their targets.

### SUMMARY

[0005] The present disclosure provides compositions, systems and methods for the epigenetic modification of target nucleic acids. In some embodiments, compositions, systems, and methods comprise or employ an effector protein (e.g., a dCas protein), an effector partner (e.g., a methyltransferase), and a guide nucleic acid. By way of non-limiting example, epigenetic modifications include methylation of target DNA. Methylation of target DNA may result in reducing or silencing target DNA expression. In some embodiments, the reducing or silencing of target DNA expression is not transient, but rather permanent or heritable. In some embodiments, compositions, systems and methods comprise or employ a catalytically inactive effector protein that does not create double stranded DNA breaks. In some instances, compositions, systems and methods are useful for the treatment of a disease or disorder.

[0006] In some aspects, disclosed herein are compositions comprising a fusion protein or a nucleic acid encoding the same, wherein the fusion protein comprises: (a) an effector protein comprising an amino acid sequence that is at least 90%, at least 95%, at least 97%, at least 98%, or at least 99% identical to a sequence selected from TABLE 1; (b) a methyltransferase; and (c) a repressor domain. In some embodiments, the effector protein comprises at least one amino acid substitution relative to the sequence selected from TABLE 1, wherein the amino acid substitution reduces a nuclease activity of the effector protein relative to the sequence selected from TABLE 1. In some embodiments, the amino acid sequence is at least 90%, at least 95%, at least 97%, at least 98%, or at least 99% identical to SEQ ID NO: 1 and wherein the effector protein comprises at least one amino acid substitution relative to SEQ ID NO: 1, wherein the amino acid substitution(s) is selected from: L26R, D369A, D369N, D658A, D658N, E567A, E567Q, A121Q, L26K, I471T, K189P, S638K, Q54R, E258K, Q79R, Y220S, N406K, E119S, S223P, K92E, K435Q, N568D, E109R, H208R, K184R, K38R, L182R, Q183R, S108R, S198R, T114R, and V521T, and a combination thereof. In some embodiments, the effector protein comprises the amino acid substitutions: L26R and E567Q. In some embodiments, the effector protein comprises an amino acid sequence that is 100% identical to SEQ ID NO: 2 with the exception of 1 to 10, 1 to 20, or 1 to 30 conservative amino acid substitutions at positions other than residue 26 and 567. In some embodiments, the effector protein comprises an amino acid sequence of SEQ ID NO: 2. In some embodiments, the length of the effector protein is 400-800 amino acids. In some embodiments, the effector protein is fused to a nuclear localization signal (NLS). In some embodiments, at least one methyltransferase is selected from DNMT3A, DNMT3L, and a combination thereof. In some embodiments, the methyltransferase comprises an amino acid sequence that is at least 90%, at least 95%, at least 97%, at least 98%, at least 99%, or 100% identical to a sequence selected from SEQ ID NO: 10 and SEQ ID NO: 11. In some embodiments, the repressor domain is selected from KRAB (ZNF10), KRAB (ZIM3), YAF2, MPP8, RYBP, CBX3VD, and CBX5VD, and a combination thereof. In some embodiments, the repressor domain comprises an amino acid sequence that is at least 90%, at least 95%, at least 97%, at least 98%, at least 99%, or 100% identical to a sequence selected from SEQ ID NOs: 12 and 3005-3009. In some embodiments, the composition comprises a guide nucleic acid or a nucleic acid encoding the guide nucleic acid, wherein the guide nucleic acid comprises a protein binding sequence and a spacer sequence. In some embodiments, the spacer sequence is at least 90% complementary to a target sequence in a eukaryotic genome. In some embodiments, the eukaryotic genome is a human genome. In some embodiments, the effector protein comprises an amino acid sequence that is at least 90%, at least 95%, at least 97%, at least 98%, at least 99%, or 100% identical to SEQ ID NO: 1, and the protein binding sequence comprises a sequence that is at least 80%, 85%, 90% or 95% identical to a nucleotide sequence selected from SEQ ID NOs: 5-9. In some embodiments, the target sequence is located in a human apolipoprotein C3 (APOC3) gene, a human Proprotein convertase subtilisin/kexin type 9 (PCSK9) gene, or a human Angiopoietin-like 3 (ANGPTL3) gene. In some embodiments, the spacer sequence comprises a nucleotide sequence that is at least 90%, at least 95%, at least 97%, at least 98%, at least 99%, or 100% identical to any one of the nucleotide sequences of SEQ ID NOs: 37-359. In some embodiments, the guide RNA comprises a nucleotide sequence that is at least 90%, at least 95%, at least 97%, at least 98%, at least 99%, or 100% identical to any one of the nucleotide sequences of SEQ ID NOs: 529-851. In some embodiments, the target sequence is adjacent to a protospacer adjacent motif of 5′-NTTN-3′. In some embodiments, the effector protein comprises an amino acid sequence that is at least 90%, at least 95%, at least 97%, at least 98%, at least 99%, or 100% identical to SEQ ID NO: 35, and the protein binding sequence comprises a sequence that is at least 80%, 85%, 90% or 95% identical to SEQ ID NO: 36. In some embodiments, the target sequence is located in a human apolipoprotein C3 (APOC3) gene, a human Proprotein convertase subtilisin/kexin type 9 (PCSK9) gene, or a human Angiopoietin-like 3 (ANGPTL3) gene. In some embodiments, the spacer sequence comprises a nucleotide sequence that is at least 90%, at least 95%, at least 97%, at least 98%, at least 99%, or 100% identical to any one of the nucleotide sequences of SEQ ID NOs: 1021-1582. In some embodiments, the guide RNA comprises a nucleotide sequence that is at least 90%, at least 95%, at least 97%, at least 98%, at least 99%, or 100% identical to any one of the nucleotide sequences of SEQ ID NOs: 1976-2537. In some embodiments, the target sequence is adjacent to a protospacer adjacent motif of 5′-NNTN-3′. In some embodiments, amongst the effector protein, methyltransferase, and repressor domain, the effector protein is nearest to the N terminus, the repressor domain is located nearest to the C terminus, and the methyltransferase is located between the effector protein and the repressor domain. In some embodiments, the nucleic acid encoding the fusion protein is an adeno associated viral (AAV) vector. In some embodiments, the AAV vector comprises the nucleic acid encoding the guide nucleic acid or encodes a guide nucleic acid. In some embodiments, the composition further comprises a lipid nanoparticle (LNP). In some embodiments, the nucleic acid encoding the fusion protein is a messenger RNA. In some embodiments, the fusion protein comprises an amino acid sequence that is at least 90%, at least 95%, at least 97%, at least 98%, at least 99%, or 100% identical to a sequence selected from SEQ ID NOs: 16-21, 3004, 3013-3025.

[0007] In some aspects, disclosed herein are compositions comprising a fusion protein or a nucleic acid encoding the fusion protein, wherein the fusion protein comprises: a) an effector protein; and b) a methyltransferase, wherein the methyltransferase is DNMT3L, wherein the composition does not comprise DNMT3A. In some embodiments, the effector protein is a Cas protein. In some embodiments, the effector protein comprises a Type V Cas protein. In some embodiments, the Cas protein comprises a Cas12J protein. In some embodiments, the effector protein is not greater than 800 contiguous amino acids in length.

[0008] In some aspects, disclosed herein are compositions comprising an effector protein that is at least 90%, at least 95%, at least 97%, at least 98%, or at least 99% identical to SEQ ID NO: 1, wherein the effector protein comprises amino acid substitutions of L26R and E567Q relative to SEQ ID NO: 1. In some embodiments, the effector protein comprises 1 to 10, 1 to 20, or 1 to 30 conservative amino acid substitutions relative to SEQ ID NO: 1 at positions other than residue 26 and 567. In some embodiments, the effector protein comprises an amino acid sequence of SEQ ID NO: 2.

[0009] In some aspects, disclosed herein are compositions comprising: a) a fusion protein or a nucleic acid encoding the fusion protein, wherein the fusion protein comprises: i. an effector protein; and ii. an effector partner; and b) a guide RNA or a nucleic acid encoding the guide RNA, wherein the guide RNA comprises: i. a first region comprising a protein binding sequence; and ii. a second region comprising a spacer sequence that hybridizes to a target sequence of a target nucleic acid. In some embodiments, the effector partner comprises a KRAB domain. In some embodiments, the effector partner comprises at least one methyltransferase selected from DNMT3A, DNMT3L, and a combination thereof. In some embodiments, the methyltransferase is DNMT3L. In some embodiments, the composition does not comprise DNMT3A. In some embodiments, the effector protein comprises an amino acid sequence that is at least 90%, at least 95%, at least 97%, at least 98%, or at least 99% identical to SEQ ID NO: 1. In some embodiments, the effector protein comprises the amino acid sequence that is 100% identical to SEQ ID NO: 1. In some embodiments, the protein binding sequence comprises a nucleotide sequence that is at least 90%, at least 95%, at least 97%, at least 98%, at least 99%, or 100% identical to the nucleotide sequences of SEQ ID NO: 9. In some embodiments, the target sequence is adjacent to a protospacer adjacent motif of 5′-NTTN-3′. In some embodiments, the target nucleic acid comprises a human apolipoprotein C3 (APOC3) gene. In some embodiments, the spacer sequence comprises a nucleotide sequence that is at least 90%, at least 95%, at least 97%, at least 98%, at least 99%, or 100% identical to any one of the nucleotide sequences of SEQ ID NOs: 37-109. In some embodiments, the guide RNA comprises a nucleotide sequence that is at least 90%, at least 95%, at least 97%, at least 98%, at least 99%, or 100% identical to any one of the nucleotide sequences of SEQ ID NOs: 529-601. In some embodiments, the target nucleic acid comprises a mouse APOC3 gene. In some embodiments, the spacer sequence comprises a nucleotide sequence that is at least 90%, at least 95%, at least 97%, at least 98%, at least 99%, or 100% identical to any one of the nucleotide sequences of SEQ ID NOs: 360-456. In some embodiments, the guide RNA comprises a nucleotide sequence that is at least 90%, at least 95%, at least 97%, at least 98%, at least 99%, or 100% identical to any one of the nucleotide sequences of SEQ ID NOs: 852-948. In some embodiments, the target nucleic acid comprises a human Proprotein convertase subtilisin/kexin type 9 (PCSK9) gene. In some embodiments, the spacer sequence comprises a nucleotide sequence that is at least 90%, at least 95%, at least 97%, at least 98%, at least 99%, or 100% identical to any one of the nucleotide sequences of SEQ ID NOs: 110-177. In some embodiments, the guide RNA comprises a nucleotide sequence that is at least 90%, at least 95%, at least 97%, at least 98%, at least 99%, or 100% identical to any one of the nucleotide sequences of SEQ ID NOs: 602-669. In some embodiments, the target nucleic acid comprises a mouse PCSK9 gene. In some embodiments, the spacer sequence comprises a nucleotide sequence that is at least 90%, at least 95%, at least 97%, at least 98%, at least 99%, or 100% identical to any one of the nucleotide sequences of SEQ ID NOs: 457-528. In some embodiments, the guide RNA comprises a nucleotide sequence that is at least 90%, at least 95%, at least 97%, at least 98%, at least 99%, or 100% identical to any one of the nucleotide sequences of SEQ ID NOs: 949-1020. In some embodiments, the target nucleic acid comprises a human Angiopoietin-like 3 (ANGPTL3) gene. In some embodiments, the spacer sequence comprises a nucleotide sequence that is at least 90%, at least 95%, at least 97%, at least 98%, at least 99%, or 100% identical to any one of the nucleotide sequences of SEQ ID NOs: 178-359. In some embodiments, the guide RNA comprises a nucleotide sequence that is at least 90%, at least 95%, at least 97%, at least 98%, at least 99%, or 100% identical to any one of the nucleotide sequences of SEQ ID NOs: 670-851. In some embodiments, the effector protein comprises an amino acid sequence that is at least 90%, at least 95%, at least 97%, at least 98%, or at least 99% identical to SEQ ID NO: 35. In some embodiments, the effector protein comprises the amino acid sequence that is 100% identical to SEQ ID NO: 35. In some embodiments, the protein binding sequence comprises a nucleotide sequence that is at least 90%, at least 95%, at least 97%, at least 98%, at least 99%, or 100% identical to the nucleotide sequences of SEQ ID NO: 36. In some embodiments, the target sequence is adjacent to a protospacer adjacent motif of 5′-NNTR-3′. In some embodiments, the target nucleic acid comprises a human APOC3 gene. In some embodiments, the spacer sequence comprises a nucleotide sequence that is at least 90%, at least 95%, at least 97%, at least 98%, at least 99%, or 100% identical to any one of the nucleotide sequences of SEQ ID NOs: 1021-1202. In some embodiments, the guide RNA comprises a nucleotide sequence that is at least 90%, at least 95%, at least 97%, at least 98%, at least 99%, or 100% identical to any one of the nucleotide sequences of SEQ ID NOs: 1976-2157. In some embodiments, the target nucleic acid comprises a mouse APOC3 gene. In some embodiments, the spacer sequence comprises a nucleotide sequence that is at least 90%, at least 95%, at least 97%, at least 98%, at least 99%, or 100% identical to any one of the nucleotide sequences of SEQ ID NOs: 1583-1800. In some embodiments, the guide RNA comprises a nucleotide sequence that is at least 90%, at least 95%, at least 97%, at least 98%, at least 99%, or 100% identical to any one of the nucleotide sequences of SEQ ID NOs: 2538-2755. In some embodiments, the target nucleic acid comprises a human PCSK9 gene. In some embodiments, the spacer sequence comprises a nucleotide sequence that is at least 90%, at least 95%, at least 97%, at least 98%, at least 99%, or 100% identical to any one of the nucleotide sequences of SEQ ID NOs: 1203-1361. In some embodiments, the guide RNA comprises a nucleotide sequence that is at least 90%, at least 95%, at least 97%, at least 98%, at least 99%, or 100% identical to any one of the nucleotide sequences of SEQ ID NOs: 2158-2316. In some embodiments, the target nucleic acid comprises a mouse PCSK9 gene. In some embodiments, the spacer sequence comprises a nucleotide sequence that is at least 90%, at least 95%, at least 97%, at least 98%, at least 99%, or 100% identical to any one of the nucleotide sequences of SEQ ID NOs: 1801-1975. In some embodiments, the guide RNA comprises a nucleotide sequence that is at least 90%, at least 95%, at least 97%, at least 98%, at least 99%, or 100% identical to any one of the nucleotide sequences of SEQ ID NOs: 2756-2930. In some embodiments, the target nucleic acid comprises a human ANGPTL3 gene. In some embodiments, the spacer sequence comprises a nucleotide sequence that is at least 90%, at least 95%, at least 97%, at least 98%, at least 99%, or 100% identical to any one of the nucleotide sequences of SEQ ID NOs: 1362-1582. In some embodiments, the guide RNA comprises a nucleotide sequence that is at least 90%, at least 95%, at least 97%, at least 98%, at least 99%, or 100% identical to any one of the nucleotide sequences of SEQ ID NOs: 2317-2537. In some embodiments, the fusion protein comprises one effector partner, wherein the effector partner is linked to the C-terminus or N-terminus of the effector protein. In some embodiments, the fusion protein comprises a first effector partner and a second effector partner. In some embodiments, the first effector partner and the second effector partner are selected from DNMT3L, DNMT3A, KRAB(ZNF10), and KRAB(ZIM3). In some embodiments, the first effector partner and the second effector partner are selected from DNMT3L and KRAB(ZNF10). In some embodiments, the first effector partner is linked to the C-terminus of the effector protein. In some embodiments, the second effector partner is linked to the N-terminus of the effector protein. In some embodiments, the second effector partner is linked to the C-terminus of the first effector partner. In some embodiments, the first effector partner is linked to the N-terminus of the effector protein. In some embodiments, the second effector partner is linked to the N-terminus of the first effector partner. In some embodiments, the fusion protein comprises a first effector partner, a second effector partner and a third effector partner. In some embodiments, the first effector partner, the second effector partner and the third effector partner are selected from DNMT3L, DNMT3A, KRAB(ZNF10), and KRAB(ZIM3). In some embodiments, the first effector partner, the second effector partner, and the third effector partner are selected from DNMT3L, DNMT3A and KRAB(ZNF10). In some embodiments, the first effector partner is linked to the C-terminus of the effector protein. In some embodiments, the second effector partner is linked to the N-terminus of the effector protein. In some embodiments, the third effector partner is linked to the C-terminus of the first effector partner. In some embodiments, the third effector partner is linked to the N-terminus of the second effector partner. In some embodiments, the second effector partner is linked to the C-terminus of the first effector partner, and wherein the third effector partner is linked to the C-terminus of the second effector partner. In some embodiments, the first effector partner is linked to the N-terminus of the effector protein, wherein the second effector partner is linked to the N-terminus of the first effector partner, and wherein the third effector partner is linked to the N-terminus of the second effector partner. In some embodiments, the effector protein comprises an amino acid sequence that is at least 90%, 91%, 92%, 93%, 94%, 95%, 96%, 97%, 98%, or 99% identical to an amino acid sequence of SEQ ID NO: 2. In some embodiments, the effector protein comprises the amino acid sequence of SEQ ID NO: 2. In some embodiments, the effector protein comprises an amino acid sequence that is at least 90%, 91%, 92%, 93%, 94%, 95%, 96%, 97%, 98%, or 99% identical to an amino acid sequence of SEQ ID NO: 2950. In some embodiments, the effector protein comprises the amino acid sequence of SEQ ID NO: 2950. In some embodiments, the fusion protein comprises an amino acid sequence that is at least 90%, at least 95%, at least 97%, at least 98%, or at least 99% identical to a sequence selected from SEQ ID NOs: 16-21. In some embodiments, the fusion protein comprises an amino acid sequence selected from SEQ ID Nos: 16-21. In some embodiments, the fusion protein comprises the effector protein comprising an amino acid sequence that is at least 90%, 91%, 92%, 93%, 94%, 95%, 96%, 97%, 98%, or 99% identical to an amino acid sequence of SEQ ID NO: 2, the first effector partner comprising an amino acid sequence that is at least 90%, 91%, 92%, 93%, 94%, 95%, 96%, 97%, 98%, or 99% identical to an amino acid sequence of SEQ ID NO: 11, and the second effector partner comprising an amino acid sequence that is at least 90%, 91%, 92%, 93%, 94%, 95%, 96%, 97%, 98%, or 99% identical to an amino acid sequence of any of SEQ ID NOs: 3005-3009. In some embodiments, the fusion protein comprises the effector protein comprising the amino acid sequence of SEQ ID NO: 2, the first effector partner comprising the amino acid sequence of SEQ ID NO: 11, and the second effector partner comprising an amino acid sequence of any of SEQ ID NOs: 3005-3009. In some embodiments, the fusion protein comprises the effector protein comprising a Cas protein, the first effector partner comprising DNMT3L, and the second effector partner comprising bipartite repressors KRAB(ZNF10)-YAF2. In some embodiments, the fusion protein comprises the effector protein comprising a Cas protein, the first effector partner comprising an amino acid sequence that is at least 90%, 91%, 92%, 93%, 94%, 95%, 96%, 97%, 98%, or 99% identical to an amino acid sequence of SEQ ID NO: 11, and the second effector partner comprising an amino acid sequence that is at least 90%, 91%, 92%, 93%, 94%, 95%, 96%, 97%, 98%, or 99% identical to an amino acid sequence of any of SEQ ID NO: 3005. In some embodiments, the fusion protein comprises the effector protein comprising a Cas protein, the first effector partner comprising the amino acid sequence of SEQ ID NO: 11, and the second effector partner comprising an amino acid sequence of any of SEQ ID NO: 3005. In some embodiments, the fusion protein comprises the effector protein comprising a Cas protein, the first effector partner comprising DNMT3L, and the second effector partner comprising CBX3VD. In some embodiments, the second effector partner further comprises KRAB(ZIM3). In some embodiments, the fusion protein comprises the effector protein comprising a Cas protein, the first effector partner comprising DNMT3L, and the second effector partner comprising bipartite repressors CBX3VD-KRAB(ZIM3). In some embodiments, the fusion protein comprises the effector protein comprising a Cas protein, the first effector partner comprising an amino acid sequence that is at least 90%, 91%, 92%, 93%, 94%, 95%, 96%, 97%, 98%, or 99% identical to an amino acid sequence of SEQ ID NO: 11, and the second effector partner comprising an amino acid sequence that is at least 90%, 91%, 92%, 93%, 94%, 95%, 96%, 97%, 98%, or 99% identical to an amino acid sequence of any of SEQ ID NO: 3008. In some embodiments, the fusion protein comprises the effector protein comprising a Cas protein, the first effector partner comprising the amino acid sequence of SEQ ID NO: 11, and the second effector partner comprising an amino acid sequence of any of SEQ ID NO: 3008. In some embodiments, the fusion protein comprises the effector protein comprising a Cas protein, the first effector partner comprising DNMT3L, and the second effector partner comprising CBX5VD. In some embodiments, the second effector partner further comprises KRAB(ZIM3). In some embodiments, the fusion protein comprises the effector protein comprising a Cas protein, the first effector partner comprising DNMT3L, and the second effector partner comprising bipartite repressors CBX5VD-KRAB(ZIM3). In some embodiments, the fusion protein comprises the effector protein comprising a Cas protein, the first effector partner comprising an amino acid sequence that is at least 90%, 91%, 92%, 93%, 94%, 95%, 96%, 97%, 98%, or 99% identical to an amino acid sequence of SEQ ID NO: 11, and the second effector partner comprising an amino acid sequence that is at least 90%, 91%, 92%, 93%, 94%, 95%, 96%, 97%, 98%, or 99% identical to an amino acid sequence of any of SEQ ID NO: 3009. In some embodiments, the fusion protein comprises the effector protein comprising a Cas protein, the first effector partner comprising the amino acid sequence of SEQ ID NO: 11, and the second effector partner comprising an amino acid sequence of any of SEQ ID NO: 3009. In some embodiments, the Cas protein comprises an amino acid sequence that is at least 90%, 91%, 92%, 93%, 94%, 95%, 96%, 97%, 98%, or 99% identical to an amino acid sequence of SEQ ID NO: 1. In some embodiments, the Cas protein comprises the amino acid sequence of SEQ ID NO: 1. In some embodiments, the Cas protein comprises an amino acid sequence that is at least 90%, 91%, 92%, 93%, 94%, 95%, 96%, 97%, 98%, or 99% identical to an amino acid sequence of SEQ ID NO: 2. In some embodiments, the Cas protein comprises the amino acid sequence of SEQ ID NO: 2. In some embodiments, the first effector partner is linked to the C-terminus of the effector protein. In some embodiments, the second effector partner is linked to the C-terminus of the first effector partner.

[0010] In some aspects, disclosed herein are kits comprising the composition of any of the above aspects or embodiments.

[0011] In some aspects, disclosed herein are methods of modifying a target nucleic acid, the method comprising contacting the target nucleic acid with the composition of any of the above aspects or embodiments or the kit of any of the above aspects or embodiments.

[0012] In some aspects, disclosed herein are cells modified by the composition of any of the above aspects or embodiments, the kit of any of the above aspects or embodiments, or the method of any of the above aspects or embodiments. In some aspects, disclosed herein are cells comprising the composition of any of the above aspects or embodiments.

[0013] In some aspects, disclosed herein are methods of reducing expression of a gene in a cell, the method comprising contacting the cell with the composition of any of the above aspects or embodiments or the kit of any of the above aspects or embodiments. In some embodiments, the cell is a mammalian cell.

### INCORPORATION BY REFERENCE

[0014] All publications, patents, and patent applications mentioned in this specification are herein incorporated by reference to the same extent as if each individual publication, patent, or patent application was specifically and individually indicated to be incorporated by reference.

### BRIEF DESCRIPTION OF THE DRAWINGS

[0015] FIG. 1 illustrates schematic representations of exemplary engineered fusion proteins for epigenetic modification of target nucleic acids.

[0016] FIG. 2 shows that the fusion proteins of FIG. 1 can repress gene expression.

[0017] FIG. 3 shows indel % and the percentage of cells in a cell population wherein a GFP reporter expression was repressed by dCasPhi.12 (L26R and E567Q)-DNMT3L-KRAB.

[0018] FIGS. 4A and 4B show percentages of cells in a cell population for which GFP reporter expression was repressed by a fusion protein comprising a mutated CasPhi.12 paired with a first exemplary guide RNA (FIG. 4A) or a second exemplary guide RNA (FIG. 4B). (DNMT3L is abbreviated as D3L).

[0019] FIGS. 5A and 5B show percentages of cells in a cell population for which GFP reporter expression was repressed by a fusion protein comprising CasPhi12(L26R_E567Q), DNMT3L and KRAB in different orientations when paired with a first exemplary guide RNA (FIG. 5A) or second exemplary guide RNA (FIG. 5B).

[0020] FIGS. 6A-6F show percentages of the cells in a cell population for which GFP reporter expression was repressed by a fusion protein comprising CasPhi12(L26R_E567Q)-DNMT3L-X (FIG. 6A), X-CasPhi12(L26R_E567Q)-DNMT3L-DNMT3A (FIG. 6B), DNMT3A-DNMT3L-CasPhi12(L26R_E567Q)-X (FIG. 6C), DNMT3L-X-CasPhi12(L26R_E567Q) (FIG. 6D), X-CasPhi12(L26R_E567Q)-DNMT3L (FIG. 6E), or X-CasPhi12(L26R_E567Q) (FIG. 6F) when paired with exemplary guide RNAs. X refers to KRAB(ZIM3) or KRAB(ZNF10).

[0021] FIGS. 7A and 7B show percentages of the cells in a cell population for which GFP reporter expression was repressed by a fusion protein comprising KRAB(ZNF10), KRAB(ZIM3) or a combination of the two, in addition to CasPhi12(L26R_E567Q) and DNMT3L in different orientations when paired with a first exemplary guide RNA (FIG. 7A) or a second exemplary guide RNA (FIG. 7B).

[0022] FIG. 8 shows percentages of the cells in a cell population for which GFP reporter expression was repressed by a fusion protein comprising mutated CasM.265466 (dCas466) and at least one effector partner selected from DNMT3L, DNMT3A and KRAB(ZNF10) in different orientations 21 days after transfection when paired with guide nucleic acids that are complementary to and/or hybridize to a target sequence situated from about −400 nucleotides to +350 nucleotides relative to the transcription start site.

[0023] FIG. 9 shows percentages of cells in a cell population for which GFP reporter expression was repressed by a fusion protein comprising a mutated CasM.265466 (dCas466) and at least one effector partner selected from DNMT3L, DNMT3A and KRAB(ZNF10) in different orientations when paired with various guide nucleic acids.

[0024] FIG. 10 shows percentages of cells in a cell population for which GFP reporter expression was repressed by a fusion protein comprising KRAB(ZNF10)-dCas466-DNMT3L-DNMT3A when paired with various guide nucleic acids targeting a sequence at various positions relative to the reporter transcription start site.

[0025] FIG. 11 shows percentages of cells in a cell population for which GFP reporter expression was repressed by a fusion protein comprising mutated CasM.265466 (dCas466) and at least one effector partner selected from DNMT3L, DNMT3A and KRAB(ZNF10) in different orientations when paired with a guide targeting a sequence located 221 nucleotides 5′ of the reporter transcription start site (−221).

[0026] FIGS. 12A-12B show percentages of cells in a cell population for which GFP reporter expression was repressed by a fusion protein comprising a dCasM effector protein selected from dCasM.288094 (dCasM.094), dCasM.288886 (dCasM.886), and dCasM.2401960 (dCasM.960) and at least one effector partner selected from DNMT3L, DNMT3A and KRAB in different orientations. The measurements were taken on day 5 (FIG. 12A) and day 7 (FIG. 12B). Control fusion proteins include dCasM.886 with a NT guide (NT886), KRAB(ZNF10)-CasPhi.12 (KRABPhi), dCasPhi(L26R, E567Q)-DNMT3L-KRAB(ZNF10) with a NT guide (NTEpiCasPhi), dCasPhi(L26R, E567Q)-DNMT3L-KRAB(ZNF10) (EpiCasPhi), dCas9 (CRISPROff), and CRISPROff with a NT guide (NTCRISPROff).

[0027] FIG. 13 shows repressors fused to the C-terminus of dCasPhi(L26R, E567Q)-DNMT3L that provide persistent repression of a GFP reporter in mammalian cells 27 days after transfection of the reporter, fusion protein and guide RNA.

[0028] FIG. 14 shows fusion proteins comprising repressor(s) fused to the C-terminus of dCasPhi(L26R, E567Q)-DNMT3L that provided the greatest persistent repression of a GFP reporter in mammalian cells 27 days after transfection of the reporter, fusion protein and guide RNA.

[0029] FIGS. 15A-15B show that variants of CasPhi.12 fused to repressor domains achieve epigenetic silencing levels near that of Cas9 (CRISPR Off). FIG. 15A shows % GFP repression and FIG. 15B shows median levels of FITC positive cells.

[0030] FIGS. 16A-16B show that CasPhi^{L26K/E567Q}-mDnmt3l-KRAB^{ZNF10} can repress multiple genes in mammalian cells 7 days (FIG. 16A) and 30 days (FIG. 16B) post-transfection.

[0031] FIGS. 17A-17B show that pooling guide nucleic acids can have an additive effect on repressive activity.

[0032] FIGS. 18A-18B show various dCasPhi.12 repressor fusion proteins can repress GFP expression for at least 21 days with two different guide nucleic acids (gKD010 and gTR079).

### DETAILED DESCRIPTION OF THE INVENTION

[0033] It is to be understood that both the foregoing general description and the following detailed description are exemplary, and explanatory only, and are not restrictive of the disclosure.

[0034] The section headings used herein are for organizational purposes only and are not to be construed as limiting the subject matter described.

[0035] All documents, or portions of documents, cited in this application, including, but not limited to, patents, patent applications, articles, books, and treatises, are hereby expressly incorporated by reference in their entirety for any purpose.

[0036] The compositions, systems, and methods described herein are non-naturally occurring. In some embodiments, compositions, systems, and methods comprise an engineered guide nucleic acid (also referred to herein as a guide nucleic acid) or a use thereof. In some embodiments, compositions, systems, and methods comprise an engineered protein or a use thereof. In some embodiments, compositions, systems, and methods comprise an isolated polypeptide or a use thereof. In general, compositions, methods, and systems described herein are not found in nature. In some embodiments, compositions, methods, and systems described herein comprise at least one non-naturally occurring component. For example, disclosed compositions, methods, and systems may comprise a guide nucleic acid, wherein the sequence of the guide nucleic acid is different or modified from that of a naturally-occurring guide nucleic acid.

[0037] In some embodiments, compositions, systems, and methods comprise at least two components that do not naturally occur together. For example, disclosed compositions, systems, and methods may comprise a guide nucleic acid comprising a first region, at least a portion of which, interacts with a polypeptide, and a second region that is at least partially complementary to a target sequence in a target nucleic acid, wherein the first region and second region do not naturally occur together and/or are heterologous to each other. Also, by way of non-limiting example, disclosed compositions, systems, and methods may comprise a guide nucleic acid and an effector protein that do not naturally occur together. Likewise, by way of non-limiting example, disclosed compositions, systems, and methods may comprise a ribonucleotide-protein (RNP) complex comprising an effector protein and a guide nucleic acid that do not occur together in nature. Conversely, and for clarity, an effector protein or guide nucleic acid that is “natural,” “naturally-occurring,” or “found in nature” includes effector proteins and guide nucleic acids from cells or organisms that have not been genetically modified by a human or machine.

[0038] In some embodiments, the guide nucleic acid comprises a non-natural nucleotide sequence. In some embodiments, the non-natural nucleotide sequence is a nucleotide sequence that is not found in nature. The non-natural nucleotide sequence may comprise a portion of a naturally-occurring sequence, wherein the portion of the naturally-occurring sequence is not present in nature absent the remainder of the naturally-occurring sequence. In some embodiments, the guide nucleic acid comprises two naturally-occurring sequences arranged in an order or proximity that is not observed in nature. In some embodiments, compositions and systems comprise a ribonucleotide complex comprising an effector protein and a guide nucleic acid that do not occur together in nature. In some embodiments, compositions and systems comprise at least two components that do not occur together in nature, wherein the at least two components comprise at least one of an effector protein, an effector partner and a guide nucleic acid. Guide nucleic acids may comprise a first sequence and a second sequence that do not occur naturally together. For example, a guide nucleic acid may comprise a naturally-occurring repeat sequence and a spacer sequence that is complementary to a naturally-occurring eukaryotic sequence. The guide nucleic acid may comprise a repeat sequence that occurs naturally in an organism and a spacer sequence that does not occur naturally in that organism. A guide nucleic acid may comprise a first sequence that occurs in a first organism and a second sequence that occurs in a second organism, wherein the first organism and the second organism are different. The guide nucleic acid may comprise a third sequence disposed at a 3′ or 5′ end of the guide nucleic acid, or between the first and second sequences of the guide nucleic acid. In some embodiments, the guide nucleic acid comprises two heterologous sequences arranged in an order or proximity that is not observed in nature. Therefore, compositions and systems described herein are not naturally occurring.

[0039] In some embodiments, compositions, systems, and methods described herein comprise a polypeptide (e.g., an effector protein, an effector partner, a fusion protein, or a combination thereof) that is similar to a naturally occurring polypeptide. The polypeptide may lack a portion of the naturally occurring polypeptide. The polypeptide may comprise a mutation relative to the naturally-occurring polypeptide, wherein the mutation is not found in nature. The polypeptide may also comprise at least one additional amino acid relative to the naturally-occurring polypeptide. In some embodiments, the polypeptide may comprise a heterologous polypeptide. For example, the polypeptide may comprise an addition of a nuclear localization signal relative to the natural occurring polypeptide. In some embodiments, a nucleotide sequence encoding the polypeptide is codon optimized (e.g., for expression in a eukaryotic cell) relative to the naturally occurring sequence.

### Definitions

[0040] Unless otherwise indicated, all technical terms used herein have the same meaning as commonly understood by one of ordinary skill in the art to which this invention belongs. Unless otherwise indicated or obvious from context, the following terms have the following meanings:

[0041] The terms, “a,” “an,” and “the,” as used herein, include plural references unless the context clearly dictates otherwise.

[0042] The terms, “or” and “and/or,” as used herein, include any and all combinations of one or more of the associated listed items.

[0043] The terms, “including,” “includes,” “included,” and other forms, are not limiting.

[0044] The terms, “comprise” and its grammatical equivalents, as used herein, specify the presence of stated features, integers, steps, operations, elements, and/or components, but do not preclude the presence or addition of one or more other features, integers, steps, operations, elements, components, and/or groups thereof.

[0045] The term, “about,” as used herein in reference to a number or range of numbers, is understood to mean the stated number and numbers +/−10% thereof, or 10% below the lower listed limit and 10% above the higher listed limit for the values listed for a range.

[0046] The terms, “% identical,” “% identity,” “percent identity,” and grammatical equivalents thereof, as used herein, in the context of an amino acid sequence or nucleotide sequence, refer to the percent of residues that are identical between respective positions of two sequences when the two sequences are aligned for maximum sequence identity. The % identity is calculated by dividing the total number of the aligned residues by the number of the residues that are identical between the respective positions of the at least two sequences and multiplying by 100. Generally, computer programs can be employed for such calculations. Illustrative programs that compare and align pairs of sequences, include ALIGN (Myers and Miller, Comput Appl Biosci. 1988 March; 4(1):11-7), FASTA (Pearson and Lipman, Proc Natl Acad Sci USA. 1988 April; 85(8):2444-8; Pearson, Methods Enzymol. 1990; 183:63-98) and gapped BLAST (Altschul et al., Nucleic Acids Res. 1997 Sep. 1; 25(17):3389-40), BLASTP, BLASTN, or GCG (Devereux et al., Nucleic Acids Res. 1984 Jan. 11; 12(1 Pt 1):387-95).

[0047] The terms, “% complementary”, “% complementarity”, “percent complementary”, “percent complementarity” and grammatical equivalents thereof, as used interchangeably herein, in the context of two or more nucleic acid molecules, refer to the percent of nucleotides in two nucleotide sequences in said nucleic acid molecules of equal length that can undergo cumulative base pairing at two or more individual corresponding positions in an antiparallel orientation. Accordingly, the terms include nucleic acid sequences that are not completely complementary over their entire length, which indicates that the two or more nucleic acid molecules include one or more mismatches. A “mismatch” is present at any position in the two opposed nucleotides that are not complementary. The % complementary is calculated by dividing the total number of the complementary residues by the total number of the nucleotides in one of the equal length sequences, and multiplying by 100. Complete or total complementarity describes nucleotide sequences in 100% of the residues of a nucleotide sequence are complementary to residues in a reference nucleotide sequence. “Partially complementarity” describes nucleotide sequences in which at least 20%, but less than 100%, of the residues of a nucleotide sequence are complementary to residues in a reference nucleotide sequence. In some instances, at least 50%, but less than 100%, of the residues of a nucleotide sequence are complementary to residues in a reference nucleotide sequence. In some instances, at least 70%, 80%, 90% or 95%, but less than 100%, of the residues of a nucleotide sequence are complementary to residues in a reference nucleotide sequence. “Noncomplementary” describes nucleotide sequences in which less than 20% of the residues of a nucleotide sequence are complementary to residues in a reference nucleotide sequence.

[0048] The term, “percent similarity,” or “% similarity,” as used herein, in the context of an amino acid sequence, refers to a value that is calculated by dividing a similarity score by the length of the alignment. The similarity of two amino acid sequences can be calculated by using a BLOSUM62 similarity matrix (Henikoff and Henikoff, Proc. Natl. Acad. Sci. USA., 89:10915-10919 (1992)) that is transformed so that any value≥1 is replaced with +1 and any value≤0 is replaced with 0. For example, an Ile (I) to Leu (L) substitution is scored at +2.0 by the BLOSUM62 similarity matrix, which in the transformed matrix is scored at +1. This transformation allows the calculation of percent similarity, rather than a similarity score. Alternately, when comparing two full protein sequences, the proteins can be aligned using pairwise MUSCLE alignment. Then, the % similarity can be scored at each residue and divided by the length of the alignment. For determining % similarity over a protein domain or motif, a multilevel consensus sequence (or PROSITE motif sequence) can be used to identify how strongly each domain or motif is conserved. In calculating the similarity of a domain or motif, the second and third levels of the multilevel sequence are treated as equivalent to the top level. Additionally, if a substitution could be treated as conservative with any of the amino acids in that position of the multilevel consensus sequence, +1 point is assigned. For example, given the multilevel consensus sequence: RLG and YCK, the test sequence QIQ would receive three points. This is because in the transformed BLOSUM62 matrix, each combination is scored as: Q-R: +1; Q-Y: +0; I-L: +1; I-C: +0; Q-G: +0; Q-K: +1. For each position, the highest score is used when calculating similarity. The % similarity can also be calculated using commercially available programs, such as the Geneious Prime software given the parameters matrix=BLOSUM62 and threshold≥1.

[0049] The terms, “bind,” “binding,” “interact” and “interacting,” as used herein, refer to a non-covalent interaction between macromolecules (e.g., between two polypeptides, between a polypeptide and a nucleic acid; between a polypeptide/guide nucleic acid complex and a target nucleic acid; and the like). While in a state of noncovalent interaction, the macromolecules are said to be “associated” or “interacting” or “binding” (e.g., when a molecule X is said to interact with a molecule Y, it is meant the molecule X binds to molecule Y in a non-covalent manner). Non-limiting examples of non-covalent interactions are ionic bonds, hydrogen bonds, van der Waals and hydrophobic interactions. Not all components of a binding interaction need be sequence-specific (e.g., contacts with phosphate residues in a DNA backbone), but some portions of a binding interaction may be sequence-specific.

[0050] The term, “catalytically inactive effector protein,” as used herein, refers to an effector protein that is modified relative to a naturally-occurring effector protein to have a reduced or eliminated catalytic activity relative to that of the naturally-occurring effector protein, but retains its ability to interact with a guide nucleic acid. The catalytic activity that is reduced or eliminated is often a nuclease activity. The naturally-occurring effector protein may be a wildtype protein. In some instances, the catalytically inactive effector protein is referred to as a catalytically inactive variant of an effector protein.

[0051] The term, “codon optimized,” as used herein, refers to a mutation of a nucleotide sequence encoding a polypeptide, such as a nucleotide sequence encoding an effector protein, to mimic the codon preferences of the intended host organism or cell while encoding the same polypeptide. Thus, the codons can be changed, but the encoded polypeptide remains unchanged. For example, if the intended target cell was a human cell, a human codon-optimized nucleotide sequence encoding an effector protein could be used. As another non-limiting example, if the intended host cell were a mouse cell, then a mouse codon-optimized nucleotide sequence encoding an effector protein could be generated. As another non-limiting example, if the intended host cell were a eukaryotic cell, then a eukaryote codon-optimized nucleotide sequence encoding an effector protein could be generated. As another non-limiting example, if the intended host cell were a prokaryotic cell, then a prokaryote codon-optimized nucleotide sequence encoding an effector protein could be generated. Codon usage tables are readily available, for example, at the “Codon Usage Database” available at www.kazusa.or.j//codon.

[0052] The terms, “complementary” and “complementarity,” as used herein, in the context of a nucleic acid molecule or nucleotide sequence, refer to the characteristic of a polynucleotide having nucleotides that can undergo cumulative base pairing with their Watson-Crick counterparts (C with G; or A with T) in a reference nucleic acid in antiparallel orientation. For example, when every nucleotide in a polynucleotide or a specified portion thereof forms a base pair with every nucleotide in an equal length sequence of a reference nucleic acid, that polynucleotide is said to be 100% complementary to the sequence of the reference nucleic acid. In a double stranded DNA or RNA sequence, the upper (sense) strand sequence is, in general, understood as going in the direction from its 5′- to 3′-end, and the complementary sequence is thus understood as the sequence of the lower (antisense) strand in the same direction as the upper strand. Following the same logic, the reverse sequence is understood as the sequence of the upper strand in the direction from its 3′- to its 5′-end, while the “reverse complement” sequence or the “reverse complementary” sequence is understood as the sequence of the lower strand in the direction of its 5′- to its 3′-end. Each nucleotide in a double stranded DNA or RNA molecule that is paired with its Watson-Crick counterpart can be referred to as its complementary nucleotide. The complementarity of modified or artificial base pairs can be based on other types of hydrogen bonding and/or hydrophobicity of bases and/or shape complementarity between bases.

[0053] The term, “conservative substitution,” as used herein, refers to the replacement of one amino acid for another such that the replacement takes place within a family of amino acids that are related in their side chains. Conversely, the term “non-conservative substitution” as used herein refers to the replacement of one amino acid residue for another that does not have a related side chain. Genetically encoded amino acids can be divided into four families having related side chains: (1) acidic (negatively charged): Asp (D), Glu (E); (2) basic (positively charged): Lys (K), Arg (R), His (H); (3) non-polar (hydrophobic): Cys (C), Ala (A), Val (V), Leu (L), Ile (I), Pro (P), Phe (F), Met (M), Trp (W), Gly (G), Tyr (Y), with non-polar also being subdivided into: (i) strongly hydrophobic: Ala (A), Val (V), Leu (L), Ile (I), Met (M), Phe (F); and (ii) moderately hydrophobic: Gly (G), Pro (P), Cys (C), Tyr (Y), Trp (W); and (4) uncharged polar: Asn (N), Gln (Q), Ser (S), Thr (T). Amino acids may be related by aliphatic side chains: Gly (G), Ala (A), Val (V), Leu (L), Ile (I), Ser (S), Thr (T), with Ser (S) and Thr (T) optionally being grouped separately as aliphatic-hydroxyl; Amino acids may be related by aromatic side chains: Phe (F), Tyr (Y), Trp (W). Amino acids may be related by amide side chains: Asn (N), Gln (Q). Amino acids may be related by sulfur-containing side chains: Cys (C) and Met (M).

[0054] The terms, “CRISPR RNA” and “crRNA,” as used herein, refer to a type of guide nucleic acid that is RNA comprising a first sequence that is capable of hybridizing to a target sequence of a target nucleic acid and a second sequence that is capable of interacting with an effector protein either directly (by being bound by an effector protein) or indirectly (e.g., by hybridization with a second nucleic acid molecule that can be bound by an effector). The first sequence and the second sequence are directly connected to each other or by a linker.

[0055] The term “dual nucleic acid system” as used herein refers to a system that uses a transactivated or transactivating tracrRNA-crRNA duplex complexed with one or more polypeptides described herein, wherein the complex is capable of interacting with a target nucleic acid in a sequence selective manner.

[0056] The term, “effector protein,” as used herein, refers to a protein, polypeptide, or peptide that is capable of interacting with a nucleic acid, such as a guide nucleic acid, to form a complex (e.g., a RNP complex), wherein the complex interacts with a target nucleic acid.

[0057] The term, “effector partner,” as used herein, refers to a protein, polypeptide or peptide that can impart a function, in combination with an effector protein and guide nucleic acid, that can be used to effectuate modification(s) of a target nucleic acid described herein and/or change expression of the target nucleic acid or other nucleic acids associated with the target nucleic acid.

[0058] The term, “engineered modification,” as used herein, refers to a structural change of one or more nucleic acid residues of a nucleotide sequence or one or more amino acid residue of an amino acid sequence. The engineered modifications of a nucleotide sequence can include chemical modification of one or more nucleobases, or a chemical change to the phosphate backbone, a nucleotide, a nucleobase or a nucleoside. The engineered modifications can be made to an effector protein amino acid sequence or guide nucleic acid nucleotide sequence, or any sequence disclosed herein (e.g., a nucleic acid encoding an effector protein or a nucleic acid that encodes a guide nucleic acid). Methods of modifying a nucleic acid or amino acid sequence are known. One of ordinary skill in the art will appreciate that the engineered modification(s) may be located at any position(s) of a nucleic acid such that the function of the nucleic acid, protein, composition or system is not substantially decreased. Nucleic acids provided herein can be prepared according to any available technique including, but not limited to chemical synthesis, enzymatic synthesis, which is generally termed in vitro-transcription, cloning, enzymatic, or chemical cleavage, etc. In some instances, the nucleic acids provided herein are not uniformly modified along the entire length of the molecule. Different nucleotide modifications and/or backbone structures can exist at various positions within the nucleic acid.

[0059] The term, “functional domain,” as used herein, refers to a region of one or more amino acids in a protein that is required for an activity of the protein, or the full extent of that activity, as measured in an in vitro assay. Activities include, but are not limited to nucleic acid binding, nucleic acid modifying, protein binding. The absence of the functional domain, including mutations of the functional domain, would abolish or reduce activity.

[0060] The term, “fused,” as used herein, refers to at least two sequences that are connected together, such as by a covalent bond (e.g., an amide bond or a phosphodiester bind) or by a linker. The covalent bond can be formed by a conjugation (e.g., chemical conjugation or enzymatic conjugation) reaction.

[0061] The term, “fusion protein,” as used herein, refers to a protein comprising at least two heterologous polypeptides. The fusion protein may comprise one or more effector protein and fusion partner. In some instances, an effector protein and fusion partner are not found connected to one another as a native protein or complex that occurs together in nature.

[0062] The term, “fusion partner,” as used herein, refers to an effector partner that is fused, or linked by a linker, to one or more effector protein. The fusion partner can impart some function to the fusion protein that is not provided by the effector protein.

[0063] The term, “genetic disease,” as used herein, refers to a disease, disorder, condition, or syndrome associated with or caused by one or more mutations in the DNA of an organism having the genetic disease.

[0064] The term, “guide nucleic acid,” as used herein, refers to a nucleic acid that, when in a complex with one or more polypeptides described herein (e.g., an RNP complex) can impart sequence selectivity to the complex when the complex interacts with a target nucleic acid. A guide nucleic acid may be referred to interchangeably as a guide RNA, however it is understood that guide nucleic acids may comprise deoxyribonucleotides (DNA), ribonucleotides (RNA), a combination thereof (e.g., RNA with a thymine base), biochemically or chemically modified nucleobases (e.g., one or more engineered modifications described herein), or combinations thereof.

[0065] The term, “handle sequence,” as used herein, refers to a sequence of nucleotides in a single guide RNA (sgRNA), that is: 1) capable of being non-covalently bound by an effector protein and 2) connects the portion of the sgRNA capable of being non-covalently bound by an effector protein to a nucleotide sequence that is hybridizable to a target nucleic acid. In general, the handle sequence comprises an intermediary sequence, that is capable of being non-covalently bound by an effector protein. In some instances, the handle sequence further comprises a repeat sequence. In such instances, the intermediary sequence or a combination of the intermediary sequence and the repeat sequence is capable of being non-covalently bound by an effector protein.

[0066] The term, “heterologous,” as used herein, refers to at least two different polypeptide sequences that are not found similarly connected to one another in a native nucleic acid or protein. A protein that is heterologous to the effector protein is a protein that is not covalently linked by an amide bond to the effector protein in nature. In some instances, a heterologous protein is not encoded by a species that encodes the effector protein. A guide nucleic acid may comprise “heterologous” sequences, which means that it includes a first sequence and a second sequence, wherein the first sequence and the second sequence are not found covalently linked by a phosphodiester bond in nature. Thus, the first sequence is considered to be heterologous with the second sequence, and the guide nucleic acid may be referred to as a heterologous guide nucleic acid. A heterologous system comprises at least one component that is not naturally occurring together with remaining components of the heterologous system.

[0067] The terms, “hybridize,” “hybridizable” and grammatical equivalents thereof, refer to a nucleotide sequence that is able to noncovalently interact, i.e. form Watson-Crick base pairs and/or G/U base pairs, or anneal, to another nucleotide sequence in a sequence-specific, antiparallel, manner (i.e., a nucleotide sequence specifically interacts to a complementary nucleotide sequence) under the appropriate in vitro and/or in vivo conditions of temperature and solution ionic strength. Standard Watson-Crick base-pairing includes: adenine (A) pairing with thymidine (T), adenine (A) pairing with uracil (U), and guanine (G) pairing with cytosine (C) for both DNA and RNA. In addition, for hybridization between two RNA molecules (e.g., dsRNA), and for hybridization of a DNA molecule with an RNA molecule (e.g., when a DNA target nucleic acid base pairs with a guide RNA, etc.): guanine (G) can also base pair with uracil (U). For example, G/U base-pairing is at least partially responsible for the degeneracy (i.e., redundancy) of the genetic code in the context of tRNA anti-codon base-pairing with codons in mRNA. Thus, a guanine (G) can be considered complementary to both an uracil (U) and to an adenine (A). Accordingly, when a G/U base-pair can be made at a given nucleotide position, the position is not considered to be non-complementary, but is instead considered to be complementary. While hybridization typically occurs between two nucleotide sequences that are complementary, mismatches between bases are possible. It is understood that two nucleotide sequences need not be 100% complementary to be specifically hybridizable, hybridizable, partially hybridizable, or for hybridization to occur. Moreover, a nucleotide sequence may hybridize over one or more segments such that intervening or adjacent segments are not involved in the hybridization event (e.g., a bulge, a loop structure or hairpin structure, etc.). The conditions appropriate for hybridization between two nucleotide sequences depend on the length of the sequence and the degree of complementarity, variables which are well known in the art. For hybridizations between nucleic acids with short stretches of complementarity (e.g. complementarity over 35 or less, 30 or less, 25 or less, 22 or less, 20 or less, or 18 or less nucleotides) the position of mismatches may become important (see Sambrook et al., supra, 11.7-11.8). Typically, the length for a hybridizable nucleic acid is 8 nucleotides or more (e.g., 10 nucleotides or more, 12 nucleotides or more, 15 nucleotides or more, 20 nucleotides or more, 22 nucleotides or more, 25 nucleotides or more, or 30 nucleotides or more). Any suitable in vitro assay may be utilized to assess whether two sequences “hybridize”. One such assay is a melting point analysis where the greater the degree of complementarity between two nucleotide sequences, the greater the value of the melting temperature (Tm) for hybrids of nucleic acids having those sequences. The conditions of temperature and ionic strength determine the “stringency” of the hybridization. Temperature, wash solution salt concentration, and other conditions may be adjusted as necessary according to factors such as length of the region of complementation and the degree of complementation. Hybridization and washing conditions are well known and exemplified in Sambrook, J. and Russell, W., Molecular Cloning: A Laboratory Manual, Third Edition, Cold Spring Harbor Laboratory Press, Cold Spring Harbor (2001); and in Green, M. and Sambrook, J., Molecular Cloning: A Laboratory Manual, Fourth Edition, Cold Spring Harbor Laboratory Press, Cold Spring Harbor (2012).

[0068] The terms, “intermediary RNA” and “intermediary sequence,” as used herein, in a context of a single nucleic acid system, refers to a nucleotide sequence in a handle sequence, wherein the nucleotide sequence is capable of, at least partially, being non-covalently bound to an effector protein to form a complex (e.g., an RNP complex). An intermediary sequence is not a transactivating nucleic acid in systems, methods, and compositions described herein.

[0069] The term, “in vitro,” as used herein, refers to describing something outside an organism. An in vitro system, composition or method may take place in a container for holding laboratory reagents such that it is separated from the biological source from which a material in the container is obtained. In vitro assays can encompass cell-based assays in which living or dead cells are employed. In vitro assays can also encompass a cell-free assay in which no intact cells are employed. The term “in vivo” is used to describe an event that takes place within an organism. The term “ex vivo” is used to describe an event that takes place in a cell that has been obtained from an organism. An ex vivo assay is not performed on a subject. Rather, it is performed upon a sample separate from a subject.

[0070] The terms, “length” and “linked” as used herein, refer to a nucleic acid (polynucleotide) or polypeptide, may be expressed as “kilobases” (kb) or “base pairs (bp),”. Thus, a length of 1 kb refers to a length of 1000 linked nucleotides, and a length of 500 bp refers to a length of 500 linked nucleotides. Similarly, a protein having a length of 500 linked amino acids may also be simply described as having a length of 500 amino acids.

[0071] The term, “linker,” as used herein, refers to a molecule that links a first polypeptide to a second polypeptide (e.g., by an amide bond) or a first nucleic acid to a second nucleic acid (e.g., by a phosphodiester bond).

[0072] The terms, “mutation associated with a disease” and “mutation associated with a genetic disorder,” as used herein, refer to the co-occurrence of a mutation and the phenotype of a disease. The mutation may occur in a gene, wherein transcription or translation products from the gene occur at a significantly abnormal level or in an abnormal form in a cell or subject harboring the mutation as compared to a non-disease control subject not having the mutation.

[0073] The terms, “non-naturally occurring” and “engineered,” as used herein, refer to indicate involvement of the hand of man. The terms, when referring to a nucleic acid, nucleotide, protein, polypeptide, peptide or amino acid, refer to a molecule, such as but not limited to, a nucleic acid, nucleotide, protein, polypeptide, peptide or amino acid refers to a modification of that molecule (e.g., chemical modification, nucleotide sequence, or amino acid sequence) that is not present in the naturally molecule. The terms, when referring to a composition or system described herein, refer to a composition or system having at least one component that is not naturally associated with the other components of the composition or system. By way of a non-limiting example, a composition may include an effector protein and a guide nucleic acid that do not naturally occur together. Conversely, and as a non-limiting further clarifying example, an effector protein or guide nucleic acid that is “natural,” “naturally-occurring,” or “found in nature” includes an effector protein and a guide nucleic acid from a cell or organism that have not been genetically modified by the hand of man.

[0074] The terms, “nuclease” and “endonuclease” as used herein, refer to an enzyme which possesses catalytic activity for nucleic acid cleavage.

[0075] The term, “nucleic acid,” as used herein, refers to a polymer of nucleotides. A nucleic acid may comprise ribonucleotides, deoxyribonucleotides, combinations thereof, and modified versions of the same. A nucleic acid may be single-stranded or double-stranded, unless specified. Non-limiting examples of nucleic acids are double stranded DNA (dsDNA), single stranded (ssDNA), messenger RNA, genomic DNA, cDNA, DNA-RNA hybrids, and a polymer comprising purine and pyrimidine bases or other natural, chemically or biochemically modified, non-natural, or derivatized nucleotide bases. Accordingly, nucleic acids as described herein may comprise one or more mutations, one or more engineered modifications, or both.

[0076] The term, “nucleic acid expression vector,” as used herein, refers to a plasmid that can be used to express a nucleic acid of interest.

[0077] The term, “nuclear localization signal (NLS),” as used herein, refers to an entity (e.g., peptide) that facilitates localization of a nucleic acid, protein, or small molecule to the nucleus, when present in a cell that contains a nuclear compartment.

[0078] The term, “pharmaceutically acceptable excipient, carrier or diluent,” as used herein, refers to any substance formulated alongside the active ingredient of a pharmaceutical composition that allows the active ingredient to retain biological activity and is non-reactive with the subject's immune system. Such a substance can be included for the purpose of long-term stabilization, bulking up solid formulations that contain potent active ingredients in small amounts, or to confer a therapeutic enhancement on the active ingredient in the final dosage form, such as facilitating absorption, reducing viscosity, or enhancing solubility. The selection of appropriate substance can depend upon the route of administration and the dosage form, as well as the active ingredient and other factors. Compositions having such substances can be formulated by suitable methods (see, e.g., Remington's Pharmaceutical Sciences, 23rd edition, A. Adejare, ed., Elsevier Inc., Philadelphia, Pa., 2020).

[0079] The terms, “polypeptide” and “protein,” as used herein, refer to a polymeric form of amino acids. A polypeptide may include coded and non-coded amino acids, chemically or biochemically modified or derivatized amino acids, and polypeptides having modified peptide backbones. Accordingly, polypeptides as described herein may comprise one or more mutations, one or more engineered modifications, or both. It is understood that when describing coding sequences of polypeptides described herein, said coding sequences do not necessarily require a codon encoding an N-terminal Methionine (M) or a Valine (V) as described for the effector proteins described herein. One skilled in the art would understand that a start codon could be replaced or substituted with a start codon that encodes for an amino acid residue sufficient for initiating translation in a host cell. In some instances, when a heterologous peptide, such as a fusion partner protein, protein tag or NLS, is located at the N terminus of the effector protein, a start codon for the heterologous peptide serves as a start codon for the effector protein as well. Thus, the natural start codon encoding an amino acid residue sufficient for initiating translation (e.g., Methionine (M) or a Valine (V)) of the effector protein may be removed or absent.

[0080] The terms, “promoter” and “promoter sequence,” as used herein, refer to a DNA regulatory region capable of binding RNA polymerase and initiating transcription of a downstream (3′ direction) coding or non-coding sequence. A transcription initiation site, as well as protein binding domains responsible for the binding of RNA polymerase, can also be found in a promoter region. Eukaryotic promoters will often, but not always, contain “TATA” boxes and “CAT” boxes. Various promoters, including inducible promoters, may be used to drive expression by the various vectors of the present disclosure.

[0081] The terms, “protospacer adjacent motif” and “PAM,” as used herein, refer to a nucleotide sequence found in a target nucleic acid that directs an effector protein to modify the target nucleic acid at a specific location. In some instances, a PAM is required for a complex of an effector protein and a guide nucleic acid (e.g., an RNP complex) to hybridize to and modify the target nucleic acid. In some instances, the complex does not require a PAM to modify the target nucleic acid.

[0082] The term, “recombinant,” as used herein, in the context of proteins, polypeptides, peptides and nucleic acids, refers to proteins, polypeptides, peptides and nucleic acids that are products of various combinations of cloning, restriction, and/or ligation steps resulting in a construct having a structural coding or non-coding sequence distinguishable from endogenous nucleic acids found in natural systems.

[0083] The term, “regulatory element,” used herein, refers to transcriptional and translational control sequences, such as promoters, enhancers, polyadenylation signals, terminators, protein degradation signals, and the like, that provide for and/or regulate transcription of a non-coding sequence (e.g., a guide nucleic acid) or a coding sequence (e.g., effector proteins, fusion proteins, and the like) and/or regulate translation of an encoded polypeptide.

[0084] The term, “repeat hybridization sequence,” as used herein, in the context of a dual nucleic acid system, refers to a sequence of nucleotides of a tracrRNA that is capable of hybridizing to a repeat sequence of a guide nucleic acid.

[0085] The term, “repeat sequence,” as used herein, refers to a sequence of nucleotides in a guide nucleic acid that is capable of, at least partially, interacting with an effector protein.

[0086] The terms, “ribonucleotide protein complex” and “RNP” as used herein, refer to a complex of one or more nucleic acids and one or more polypeptides described herein. While the term utilizes “ribonucleotides” it is understood that the one or more nucleic acid may comprise deoxyribonucleotides (DNA), ribonucleotides (RNA), a combination thereof (e.g., RNA with a thymine base), biochemically or chemically modified nucleobases (e.g., one or more engineered modifications described herein), or combinations thereof.

[0087] The terms, “RuvC” and “RuvC domain,” as used herein, refer to a region of an effector protein that is capable of cleaving a target nucleic acid, and in certain instances, of processing a pre-crRNA. In some instances, the RuvC domain is located near the C-terminus of the effector protein. A single RuvC domain may comprise RuvC subdomains, for example a RuvCI subdomain, a RuvCII subdomain and a RuvCIII subdomain. The term “RuvC” domain can also refer to a “RuvC-like” domain. Various RuvC-like domains are known in the art and are easily identified using online tools such as IntePro (https://www.ebi.ac.uk/interpro/). For example, a RuvC-like domain may be a domain which shares homology with a region of TnpB proteins of the IS605 and other related families of transposons.

[0088] The terms, “single guide nucleic acid”, “single guide RNA” and “sgRNA,” as used herein, in the context of a single nucleic acid system, refers to a guide nucleic acid, wherein the guide nucleic acid is a single polynucleotide chain having all the required sequence for a functional complex with an effector protein (e.g., being bound by an effector protein, including in some instances activating the effector protein, and hybridizing to a target nucleic acid, without the need for a second nucleic acid molecule). For example, an sgRNA can have two or more linked guide nucleic acid components (e.g., an intermediary sequence, a repeat sequence, a spacer sequence and optionally a linker, or a handle sequence and a spacer sequence).

[0089] The term, “single nucleic acid system,” as used herein, refers to a system that uses a guide nucleic acid complexed with one or more polypeptides described herein, wherein the complex is capable of interacting with a target nucleic acid in a sequence specific manner, and wherein the guide nucleic acid is capable of non-covalently interacting with the one or more polypeptides described herein, and wherein the guide nucleic acid is capable of hybridizing with a target sequence of the target nucleic acid. A single nucleic acid system lacks a duplex of a guide nucleic acid as hybridized to a second nucleic acid, wherein in such a duplex the second nucleic acid, and not the guide nucleic acid, is capable of interacting with the effector protein.

[0090] The term, “spacer sequence,” as used herein, refers to a nucleotide sequence in a guide nucleic acid that is capable of, at least partially, hybridizing to an equal length portion of a sequence (e.g., a target sequence) of a target nucleic acid.

[0091] The term, “subject,” as used herein, refers to an animal. The subject may be a mammal. The subject may be a human. The subject may be diagnosed or at risk for a disease.

[0092] The term, “sufficiently complementary,” as used herein, refers to a first nucleotide sequence that is partially complementarity to a second nucleotide sequence while still allowing the first nucleotide sequence to hybridize to the second nucleotide sequence with enough affinity to permit a biological activity to occur. Depending on the context, a biological activity may be the formation of a complex between two or more components described herein, such as an effector protein and a guide nucleic acid. A biological activity may also be bringing one or more components described herein into proximity of another component, such as bringing an effector protein-guide nucleic acid complex into proximity of a target nucleic acid. A biological activity may additionally be permitting a component described herein to act on another component described herein. In some instances, sequences are said to be sufficiently complementary when at least 85% of the residues of a nucleotide sequence are complementary to residues in a reference nucleotide sequence.

[0093] The term, “syndrome,” as used herein, refers to a group of symptoms which, taken together, characterize a condition.

[0094] The term, “target nucleic acid,” as used herein, refers to a nucleic acid that is selected as the nucleic acid for modification, binding, hybridization or any other activity of or interaction with a nucleic acid, protein, polypeptide, or peptide described herein. A target nucleic acid may comprise RNA, DNA, or a combination thereof. A target nucleic acid may be single-stranded (e.g., single-stranded RNA or single-stranded DNA) or double-stranded (e.g., double-stranded DNA).

[0095] The term, “target sequence,” as used herein, in the context of a target nucleic acid, refers to a nucleotide sequence found within a target nucleic acid. Such a nucleotide sequence can, for example, hybridize to a respective length portion of a guide nucleic acid.

[0096] The terms, “trans-activating RNA”, “transactivating RNA” and “tracrRNA,” refer to a transactivating or transactivated nucleic acid in a dual nucleic acid system that is capable of hybridizing, at least partially, to a crRNA to form a tracrRNA-crRNA duplex, and of interacting with an effector protein to form a complex (e.g., an RNP complex).

[0097] The terms, “transactivating”, “trans-activating”, “trans-activated”, “transactivated” and grammatical equivalents thereof, as used herein, in the context of a dual nucleic acid system refers to an outcome of the system, wherein a polypeptide is enabled to have a binding and/or nuclease activity on a target nucleic acid, by a tracrRNA or a tracrRNA-crRNA duplex.

[0098] The term, “transgene,” as used herein, refers to a nucleotide sequence that is inserted into a cell for expression of said nucleotide sequence in the cell. A transgene is meant to include (1) a nucleotide sequence that is not naturally found in the cell (e.g., a heterologous nucleotide sequence); (2) a nucleotide sequence that is a mutant form of a nucleotide sequence naturally found in the cell into which it has been introduced; (3) a nucleotide sequence that serves to add additional copies of the same (e.g., exogenous or homologous) or a similar nucleotide sequence naturally occurring in the cell into which it has been introduced; or (4) a silent naturally occurring or homologous nucleotide sequence whose expression is induced in the cell into which it has been introduced. The cell in which transgene expression occurs can be a target cell, such as a host cell.

[0099] The terms, “treatment” and “treating,” as used herein, refer to a pharmaceutical or other intervention regimen for obtaining beneficial or desired results in the recipient. Beneficial or desired results include but are not limited to a therapeutic benefit and/or a prophylactic benefit. A therapeutic benefit may refer to eradication or amelioration of symptoms or of an underlying disorder being treated. Also, a therapeutic benefit can be achieved with the eradication or amelioration of one or more of the physiological symptoms associated with the underlying disorder such that an improvement is observed in the subject, notwithstanding that the subject may still be afflicted with the underlying disorder. A prophylactic effect includes delaying, preventing, or eliminating the appearance of a disease or condition, delaying, or eliminating the onset of symptoms of a disease or condition, slowing, halting, or reversing the progression of a disease or condition, or any combination thereof. For prophylactic benefit, a subject at risk of developing a particular disease, or to a subject reporting one or more of the physiological symptoms of a disease may undergo treatment, even though a diagnosis of this disease may not have been made.

[0100] The term, “variant,” as used herein, refers to a form or version of a protein that differs from the wild-type protein. A variant may have a different function or activity relative to the wild-type protein.

[0101] The term, “viral vector,” as used herein, refers to a nucleic acid to be delivered into a host cell by a recombinantly produced virus or viral particle.

### I. Epigenetic Silencing Systems

[0102] Disclosed herein in some aspects are compositions, systems, and kits that comprise an effector protein, an effector partner protein (also referred to simply as an effector partner), and a guide nucleic acid, wherein the effector protein and the guide nucleic acid form a ribonucleoprotein (RNP) complex. In general, a portion of the guide nucleic acid is capable of hybridizing to a target sequence of a target nucleic acid. Thus, the RNP can interact with the target nucleic acid. An effector partner is either recruited to the effector protein and/or RNP or the effector partner is fused to the effector protein. Thus, the effector partner is brought into proximity of the target sequence of the target nucleic acid. The effector partner may comprise epigenetic activity that represses, inhibits, reduces or abolishes expression of the target nucleic acid. A non-limiting example of such an effector partner is a methyltransferase. Epigenetic modification of the target nucleic acid may permanently silence the gene. In some embodiments, the epigenetic modification is heritable.

[0103] In some embodiments, effector proteins, effector partner proteins, and guide nucleic acids are provided in the form of a single composition. In some embodiments, effector proteins, effector partner proteins, and guide nucleic acids are provided in a single solution. In some embodiments, effector proteins, effector partner proteins, and guide nucleic acids are provided in a single container. In some embodiments, effector proteins, effector partner proteins, and guide nucleic acids are provided as components of a system or kit, wherein a first component is provided in a first composition (e.g., solution, container), and a second component is provided in a second composition (e.g., solution, container), wherein the first composition and the second composition are not the same. In some embodiments, methods comprise administering the first composition and the second composition simultaneously. In some embodiments, methods comprise administering the first composition and the second composition sequentially.

[0104] In some embodiments, the effector partner is recruited to the effector protein, RNP, guide nucleic acid, or a combination thereof. In some embodiments, the guide nucleic acid comprises an aptamer and the effector partner comprises or is fused to an aptamer binding peptide/protein. In some embodiments, the effector protein is fused to an accessory protein or peptide that binds to the effector partner. The effector partner may be endogenous to a cell, and therefore not included in a pharmaceutical composition. In some embodiments, the effector partner is administered in a composition or otherwise exogenously added.

[0105] In some embodiments, the effector partner is a fusion partner. In some embodiments, compositions, systems, and methods comprise a fusion protein or uses thereof, wherein the fusion protein comprises an effector protein and an effector partner. In the context of a fusion protein, the effector partner may be referred to as a fusion partner. In some embodiments, the effector partner is fused to the N-terminus of the effector protein. In some embodiments, the effector partner is fused to the C-terminus of the effector protein. In some embodiments, the fusion protein complexes with a guide nucleic acid and the complex interacts with the target nucleic acid. In some embodiments, the interaction comprises one or more of: recognition of a protospacer adjacent motif (PAM) sequence within the target nucleic acid by the effector protein, hybridization of the guide nucleic acid to the target nucleic acid, modification of the target nucleic acid by the effector partner. In some embodiments, recognition of a PAM sequence within a target nucleic acid may direct the modification activity of a fusion protein.

### A. Effector Proteins

[0106] Provided herein are compositions, systems, and methods comprising an effector protein or a use thereof. An effector protein provided herein interacts with a guide nucleic acid to form a complex. In some embodiments, the complex interacts with a target nucleic acid. In some embodiments, an interaction between the complex and a target nucleic acid comprises one or more of: recognition of a protospacer adjacent motif (PAM) sequence within the target nucleic acid by the effector protein, hybridization of the guide nucleic acid to the target nucleic acid, modification of the target nucleic acid by the effector protein, or combinations thereof. In some embodiments, recognition of a PAM sequence within a target nucleic acid may direct the modification activity of an effector protein. In some embodiments, recognition of a PAM sequence adjacent to a target sequence of a target nucleic acid may direct the modification activity of an effector protein.

[0107] In some embodiments, an ability of an effector protein to modify a target nucleic acid may depend upon the effector protein being complexed with a guide nucleic acid, the guide nucleic acid being hybridized to a target sequence of the target nucleic acid, the distance between the target sequence and a PAM sequence, or a combination thereof.

[0108] The modification of the target nucleic acid generated by an effector protein may, as a non-limiting example, result in modulation of the expression of the target nucleic acid (e.g., decreasing expression of the nucleic acid). Accordingly, provided herein are methods of modulating expression of a target nucleic acid using an effector protein of the present disclosure, or compositions or systems thereof.

[0109] In some embodiments, the effector protein comprises one or more amino acid alterations relative to a naturally occurring effector protein. The one or more amino acid alterations may result in a change in activity of the effector protein relative to the naturally-occurring effector protein. In some embodiments, the one or more amino acid alterations results in a catalytically inactive effector protein variant. An effector protein that has decreased catalytic activity may be referred to as catalytically or enzymatically inactive, catalytically or enzymatically dead, as a dead protein or a dCas protein. In some embodiments, such a protein may comprise an enzymatically inactive domain (e.g. inactive nuclease domain). For example, a nuclease domain of an effector protein may be deleted or mutated relative to a wildtype counterpart so that it is no longer functional or comprises reduced nuclease activity. In some embodiments, a catalytically inactive effector protein may bind to a guide nucleic acid and/or a target nucleic acid but does not cleave the target nucleic acid. In some embodiments, a catalytically inactive effector protein may associate with a guide nucleic acid to activate or repress transcription of a target nucleic acid. In some embodiments, a catalytically inactive effector protein is fused to a fusion partner that confers an alternative activity to an effector protein activity. Such fusion proteins are described herein and throughout.

[0110] In some embodiments, an effector protein comprises a Type V Cas protein. In some embodiments, an effector protein comprises a RuvC domain. In some embodiments, an effector protein comprises an HNH domain. In some embodiments, an effector protein comprises an HNH domain. In some embodiments, an effector protein comprises a RuvC domain and does not comprise an HNH domain. In some embodiments, an effector protein comprises a Cas12J protein. Non-limiting examples of Cas12J proteins are described in WO2020181101, WO2021247924, WO2022159822, and WO2022055998. In some embodiments, effector proteins comprise less than 600, less than 700, less than 800, or less than 900 amino acids, but at least 300 amino acids. In some embodiments, the effector protein comprises about 300 to about 800 amino acids. In some embodiments, the effector protein comprises about 400 to about 800 amino acids.

[0111] In some embodiments, effector proteins comprise an amino acid sequence that is at least 80%, at least 85%, at least 90%, at least 95%, at least 97%, at least 98%, or at least 99% identical to SEQ ID NO: 1. In some embodiments, the effector protein comprises at least one amino acid substitution relative to SEQ ID NO: 1, wherein the at least one amino acid substitution is selected from: L26R, L26K, A121Q, D369A, D369N, D658A, D658N, E567A, and E567Q, and a combination thereof. In some embodiments, these amino acid substitutions reduce a catalytic activity of the effector protein relative to that of an effector protein that is 100% identical to SEQ ID NO: 1. In some embodiments, the catalytic activity is nuclease activity.

[0112] In some embodiments, effector proteins comprise an amino acid sequence that is at least 80%, at least 85%, at least 90%, at least 95%, at least 97%, at least 98%, or at least 99% identical to SEQ ID NO: 1, wherein the effector protein comprises at least one amino acid substitution relative to SEQ ID NO: 1, wherein the at least one amino acid substitution is selected from: L26R, D369A, D369N, D658A, D658N, E567A, E567Q, A121Q, L26K, I471T, K189P, S638K, Q54R, E258K, Q79R, Y220S, N406K, E119S, S223P, K92E, K435Q, N568D, E109R, H208R, K184R, K38R, L182R, Q183R, S108R, S198R, T114R, and V521T, and a combination thereof. In some embodiments, the amino acid substitution increases binding of the effector protein to a guide nucleic acid, target nucleic acid, or combination thereof.

[0113] In some embodiments, effector protein comprise at least two amino acid substitutions, wherein a first amino acid substitution reduces a catalytic activity of the effector protein relative to that of an effector protein that is 100% identical to SEQ ID NO: 1; and a second amino acid substitution increases binding of the effector protein to a guide nucleic acid, target nucleic acid, or combination thereof relative to that of an effector protein that is 100% identical to SEQ ID NO: 1.

[0114] In some embodiments, the effector protein comprise two amino acid substitutions relative to SEQ ID NO: 1, wherein the two amino acid substitutions are L26R and E567Q. In some embodiments, the effector protein comprise an amino acid sequence that is at least 80%, at least 85%, at least 90%, at least 95%, at least 97%, at least 98%, or at least 99% identical to SEQ ID NO: 2. In some embodiments, the effector protein comprise the amino acid sequence set forth in SEQ ID NO: 2.

[0115] In some embodiments, effector proteins comprise an amino acid sequence that is at least 80%, at least 85%, at least 90%, at least 95%, at least 97%, at least 98%, or at least 99% identical to SEQ ID NO: 35. In some embodiments, the effector protein comprises at least one amino acid substitution relative to SEQ ID NO: 35. In some embodiments, these amino acid substitutions reduce a catalytic activity of the effector protein relative to that of an effector protein that is 100% identical to SEQ ID NO: 35. In some embodiments, the catalytic activity is nuclease activity.

[0116] In some embodiments, effector proteins comprise an amino acid sequence that is at least 80%, at least 85%, at least 90%, at least 95%, at least 97%, at least 98%, or at least 99% identical to SEQ ID NO: 35, wherein the effector protein comprises at least one amino acid substitution relative to SEQ ID NO: 35, wherein the at least one amino acid substitution is selected from: D220R, E335Q, and a combination thereof.

[0117] In some embodiments, effector protein comprise at least two amino acid substitutions, wherein a first amino acid substitution reduces a catalytic activity of the effector protein relative to that of an effector protein that is 100% identical to SEQ ID NO: 35; and a second amino acid substitution increases binding of the effector protein to a guide nucleic acid, target nucleic acid, or combination thereof relative to that of an effector protein that is 100% identical to SEQ ID NO: 35.

[0118] In some embodiments, the effector protein comprise two amino acid substitutions relative to SEQ ID NO: 35, wherein the two amino acid substitutions are D220R and E335Q. In some embodiments, the effector protein comprise an amino acid sequence that is at least 80%, at least 85%, at least 90%, at least 95%, at least 97%, at least 98%, or at least 99% identical to SEQ ID NO: 2950. In some embodiments, the effector protein comprise the amino acid sequence set forth in SEQ ID NO: 2950. In some embodiments, the effector protein comprise an amino acid sequence that is at least 80%, at least 85%, at least 90%, at least 95%, at least 97%, at least 98%, or at least 99% identical to SEQ ID NO: 3010. In some embodiments, the effector protein comprise the amino acid sequence set forth in SEQ ID NO: 3010. In some embodiments, the effector protein comprise an amino acid sequence that is at least 80%, at least 85%, at least 90%, at least 95%, at least 97%, at least 98%, or at least 99% identical to SEQ ID NO: 3011. In some embodiments, the effector protein comprise the amino acid sequence set forth in SEQ ID NO: 3011. In some embodiments, the effector protein comprise an amino acid sequence that is at least 80%, at least 85%, at least 90%, at least 95%, at least 97%, at least 98%, or at least 99% identical to SEQ ID NO: 3012. In some embodiments, the effector protein comprise the amino acid sequence set forth in SEQ ID NO: 3012.

[0119] TABLE 1 provides illustrative amino acid sequences of effector proteins that are useful in the compositions, systems and methods described herein. In some embodiments, an effector protein, or a recombinant nucleic acid encoding an effector protein, comprises an amino acid sequence that is at least 85% identical to any one of the sequences set forth in TABLE 1. In some embodiments, the recombinant nucleic acid encoding the effector protein is operably linked to a promoter, wherein the promoter is functional in a eukaryotic cell or a prokaryotic cell. In some embodiments, the promoter is any one or more of: a constitutive promoter, an inducible promoter, a cell type-specific promoter, and a tissue-specific promoter. In some embodiments, the recombinant nucleic acid described herein wherein the promoter is functional in any one of: a plant cell, a fungal cell, an animal cell, cell of an invertebrate, a fly cell, a cell of a vertebrate, a mammalian cell, a primate cell, a non-human primate cell, and a human cell. In some embodiments, the recombinant nucleic acid is a nucleic acid expression vector as described herein.

[0120] In some embodiments, compositions, systems and methods described herein comprise an effector protein, or a nucleic acid encoding the effector protein, wherein the amino acid sequence of the effector protein comprises at least about 200 contiguous amino acids or more of any one of the sequences recited in TABLE 1. In some embodiments, the amino acid sequence of an effector protein provided herein comprises at least about 200, at least about 220, at least about 240, at least about 260, at least about 280, at least about 300, at least about 320, at least about 340, at least about 360, at least about 380, at least about 400 contiguous amino acids, at least about 420 contiguous amino acids, at least about 440 contiguous amino acids, at least about 460 contiguous amino acids, at least about 480 contiguous amino acids, at least about 500 contiguous amino acids, at least about 520 contiguous amino acids, at least about 540 contiguous amino acids, at least about 560 contiguous amino acids, at least about 580 contiguous amino acids, at least about 600 contiguous amino acids, at least about 620 contiguous amino acids, at least about 640 contiguous amino acids, at least about 660 contiguous amino acids, at least about 680 contiguous amino acids, at least about 700 contiguous amino acids of any one of the sequences of TABLE 1.

[0121] In some embodiments, compositions, systems and methods described herein comprise an effector protein or a nucleic acid encoding the effector protein, wherein the effector protein comprises a portion of any one of the sequences recited in TABLE 1. In some embodiments, the effector protein comprises a portion of any one of the sequences recited in TABLE 1, wherein the portion does not comprise at least the first 10 amino acids, at least the first 20 amino acids, at least the first 40 amino acids, at least the first 60 amino acids, at least the first 80 amino acids, at least the first 100 amino acids, at least the first 120 amino acids, at least the first 140 amino acids, at least the first 160 amino acids, at least the first 180 amino acids, or at least the first 200 amino acids of any one of the sequences recited in TABLE 1. In some embodiments, the effector protein comprises a portion of any one of the sequences recited in TABLE 1, wherein the portion does not comprise the last 10 amino acids, the last 20 amino acids, the last 40 amino acids, the last 60 amino acids, the last 80 amino acids, the last 100 amino acids, the last 120 amino acids, the last 140 amino acids, the last 160 amino acids, the last 180 amino acids, or the last 200 amino acids of any one of the sequences recited in TABLE 1.

[0122] In some embodiments, compositions, systems, and methods described herein comprise an effector protein, or a nucleic acid encoding the effector protein, wherein the effector protein comprises an amino acid sequence that is at least 65%, at least 70%, at least 75%, at least 80%, at least 85%, at least 90%, at least 95%, at least 97%, at least 98%, at least 99%, or 100% identical to any one of the sequences as set forth in TABLE 1. In some embodiments, an effector protein provided herein comprises an amino acid sequence that is at least 65% identical to any one of the sequences as set forth in TABLE 1. In some embodiments, an effector protein provided herein comprises an amino acid sequence that is at least 70% identical to any one of the sequences as set forth in TABLE 1. In some embodiments, an effector protein provided herein comprises an amino acid sequence that is at least 75% identical to any one of the sequences as set forth in TABLE 1. In some embodiments, an effector protein provided herein comprises an amino acid sequence that is at least 80% identical to any one of the sequences as set forth in TABLE 1. In some embodiments, an effector protein provided herein comprises an amino acid sequence that is at least 85% identical to any one of the sequences as set forth in TABLE 1. In some embodiments, an effector protein provided herein comprises an amino acid sequence that is at least 90% identical to any one of the sequences as set forth in TABLE 1. In some embodiments, an effector protein provided herein comprises an amino acid sequence that is at least 95% identical to any one of the sequences as set forth in TABLE 1. In some embodiments, an effector protein provided herein comprises an amino acid sequence that is at least 97% identical to any one of the sequences as set forth in TABLE 1. In some embodiments, an effector protein provided herein comprises an amino acid sequence that is at least 98% identical to any one of the sequences as set forth in TABLE 1. In some embodiments, an effector protein provided herein comprises an amino acid sequence that is at least 99% identical to any one of the sequences as set forth in TABLE 1. In some embodiments, an effector protein provided herein comprises an amino acid sequence that is identical to any one of the sequences as set forth in TABLE 1.

[0123] In some embodiments, compositions, systems, and methods described herein comprise an effector protein, or a nucleic acid encoding the effector protein, wherein the effector protein comprises an amino acid sequence that is at least 80%, at least 85%, at least 90%, at least 95%, at least 97%, at least 98%, at least 99%, or 100% similar to any one of the sequences as set forth in TABLE 1. In some embodiments, an effector protein provided herein comprises an amino acid sequence that is at least 80% similar to any one of the sequences as set forth in TABLE 1. In some embodiments, an effector protein provided herein comprises an amino acid sequence that is at least 85% similar to any one of the sequences as set forth in TABLE 1. In some embodiments, an effector protein provided herein comprises an amino acid sequence that is at least 90% identical to any one of the sequences as set forth in TABLE 1. In some embodiments, an effector protein provided herein comprises an amino acid sequence that is at least 95% similar to any one of the sequences as set forth in TABLE 1. In some embodiments, an effector protein provided herein comprises an amino acid sequence that is at least 97% similar to any one of the sequences as set forth in TABLE 1. In some embodiments, an effector protein provided herein comprises an amino acid sequence that is at least 98% similar to any one of the sequences as set forth in TABLE 1. In some embodiments, an effector protein provided herein comprises an amino acid sequence that is at least 99% similar to any one of the sequences as set forth in TABLE 1. In some embodiments, an effector protein provided herein comprises an amino acid sequence that is 100% similar to any one of the sequences as set forth in TABLE 1.

[0124] In some embodiments, compositions, systems, and methods described herein comprise an effector protein, or a nucleic acid encoding the effector protein, wherein the effector protein comprises one or more amino acid alterations relative to any one of the sequences recited in TABLE 1. In some embodiments, the one or more alterations comprises at least one, at least two, at least three, at least four, at least five, at least six, at least seven, at least eight, at least nine, at least ten, at least twelve, at least sixteen, at least twenty, or more amino acid alterations relative to any one of the sequences recited in TABLE 1. In some embodiments, the one or more alterations comprises one to twenty, one to sixteen, one to twelve, one to eight, one to four, four to twenty, four to sixteen, four to twelve, four to eight, eight to twenty, eight to sixteen, eight to twelve, twelve to twenty, twelve to sixteen, or sixteen to twenty amino acid alterations relative to any one of the sequences recited in TABLE 1. In some embodiments, the one or more alterations comprises one, two, three, four, five, six, seven, eight, nine, ten, or more amino acid alterations relative to any one of the sequences recited in TABLE 1. In some embodiments, the effector protein comprising one or more amino acid alterations is a variant of an effector protein described herein. It is understood that any reference to an effector protein herein also refers to an effector protein variant as described herein. In some embodiments, the one or more amino acid alterations comprises conservative substitutions, non-conservative substitutions, deletions, or combinations thereof. In some embodiments, an effector protein or a nucleic acid encoding the effector protein comprises 1 amino acid alteration, 2 amino acid alterations, 3 amino acid alterations, 4 amino acid alterations, 5 amino acid alterations, 6 amino acid alterations, 7 amino acid alterations, 8 amino acid alterations, 9 amino acid alterations, 10 amino acid alterations or more relative to any one of the sequences recited in TABLE 1.

[0125] In some embodiments, compositions, systems, and methods described herein comprise an effector protein, or a nucleic acid encoding the effector protein, wherein the effector protein comprises one or more substitutions relative to any one of the sequences recited in TABLE 1. In some embodiments, the one or more substitutions comprises at least one, at least two, at least three, at least four, at least five, at least six, at least seven, at least eight, at least nine, at least ten, at least twelve, at least sixteen, at least twenty, or more substitutions relative to any one of the sequences recited in TABLE 1. In some embodiments, the one or more substitutions comprises one to twenty, one to sixteen, one to twelve, one to eight, one to four, four to twenty, four to sixteen, four to twelve, four to eight, eight to twenty, eight to sixteen, eight to twelve, twelve to twenty, twelve to sixteen, or sixteen to twenty substitutions relative to any one of the sequences recited in TABLE 1. In some embodiments, the one or more substitutions comprise one, two, three, four, five, six, seven, eight, nine, ten or more substitutions relative to any one of the sequences recited in TABLE 1. In some embodiments, the one or more substitutions comprise one or more conservative substitutions, one or more non-conservative substitutions, or combinations thereof.

[0126] In some embodiments, compositions, systems, and methods described herein comprise an effector protein, or a nucleic acid encoding the effector protein, wherein the effector protein comprises one or more conservative substitutions relative to any one of the sequences recited in TABLE 1. In some embodiments, the one or more conservative substitutions comprises at least one, at least two, at least three, at least four, at least five, at least six, at least seven, at least eight, at least nine, at least ten, at least twelve, at least sixteen, at least twenty, or more conservative substitutions relative to any one of the sequences recited in TABLE 1. In some embodiments, the one or more conservative substitutions comprises one to twenty, one to sixteen, one to twelve, one to eight, one to four, four to twenty, four to sixteen, four to twelve, four to eight, eight to twenty, eight to sixteen, eight to twelve, twelve to twenty, twelve to sixteen, or sixteen to twenty conservative substitutions relative to any one of the sequences recited in TABLE 1. In some embodiments, the one or more conservative substitutions comprise one, two, three, four, five, six, seven, eight, nine, ten or more conservative substitutions relative to any one of the sequences recited in TABLE 1.

[0127] In some embodiments, compositions, systems, and methods described herein comprise an effector protein, or a nucleic acid encoding the effector protein, wherein the effector protein comprises one or more non-conservative substitutions relative to any one of the sequences recited in TABLE 1. In some embodiments, the one or more non-conservative substitutions comprises at least one, at least two, at least three, at least four, at least five, at least six, at least seven, at least eight, at least nine, at least ten, at least twelve, at least sixteen, at least twenty, or more non-conservative substitutions relative to any one of the sequences recited in TABLE 1. In some embodiments, the one or more non-conservative substitutions comprises one to twenty, one to sixteen, one to twelve, one to eight, one to four, four to twenty, four to sixteen, four to twelve, four to eight, eight to twenty, eight to sixteen, eight to twelve, twelve to twenty, twelve to sixteen, or sixteen to twenty non-conservative substitutions relative to any one of the sequences recited in TABLE 1. In some embodiments, the one or more non-conservative substitutions comprise one, two, three, four, five, six, seven, eight, nine, ten or more non-conservative substitutions relative to any one of the sequences recited in TABLE 1.

### Protospacer Adjacent Motif (PAM) Sequences

[0128] Effector proteins of the present disclosure may bind a target nucleic acid within or near a protospacer adjacent motif (PAM) sequence of the target nucleic acid. In some embodiments, the target nucleic acid is a double stranded nucleic acid comprising a target strand and a non-target strand. In some embodiments, binding occurs within 1, 2, 3, 4, 5, 6, 7, 8, 9, 10, 15, 20, 25, 30, 35, 40, 45, or 50 nucleotides of a 5′ or 3′ terminus of a PAM sequence. In some embodiments, effector proteins described herein recognize a PAM sequence. In some embodiments, recognizing a PAM sequence comprises interacting with a sequence adjacent to the PAM. In some embodiments, a target nucleic acid comprises a target sequence that is adjacent to a PAM sequence. In some embodiments, the effector protein does not require a PAM to bind a target nucleic acid.

[0129] In some embodiments, a target nucleic acid is a single stranded target nucleic acid comprising a target sequence. Accordingly, in some embodiments, the single stranded target nucleic acid comprises a PAM sequence described herein that is adjacent (e.g., within 1, 2, 3, 4, 5, 6, 7, 8, 9, 10, 15, 20, 25, 30, 35, 40, 45, or 50 nucleotides) or directly adjacent to the target sequence.

[0130] In some embodiments, a target nucleic acid is a double stranded nucleic acid comprising a target strand and a non-target strand, wherein the target strand comprises a target sequence. In some embodiments, the PAM sequence is located on the target strand. In some embodiments, the PAM sequence is located on the non-target strand. In some embodiments, the PAM sequence described herein is adjacent (e.g., within 1, 2, 3, 4, 5, 6, 7, 8, 9, 10, 15, 20, 25, 30, 35, 40, 45, or 50 nucleotides) to the target sequence on the target strand or the non-target strand. In some embodiments, the PAM sequence is located 5′ of the target sequence on the non-target strand. In some embodiments, such a PAM described herein is directly adjacent to the target sequence on the target strand or the non-target strand. In some embodiments, an RNP does not cleave the target strand or the non-target strand. In some embodiments, an RNP recognizes the PAM sequence, and hybridizes to a target sequence of the target nucleic acid.

[0131] In some embodiments, an effector protein described herein, or a multimeric complex thereof, recognizes a PAM on a target nucleic acid. In some embodiments, multiple effector proteins of the multimeric complex recognize a PAM on a target nucleic acid. In some embodiments, at least two of the multiple effector proteins recognize the same PAM sequence. In some embodiments, at least two of the multiple effector proteins recognize different PAM sequences. In some embodiments, only one effector protein of the multimeric complex recognizes a PAM on a target nucleic acid.

[0132] In some embodiments, a PAM sequence provided herein comprises any one of the nucleotide sequences recited in TABLE 3. In some embodiments, the PAM is 5′-NTTN-3′. In some embodiments, the PAM is 5′-NNTR-3′. In some embodiments, the effector protein set forth in SEQ ID NO: 1 or 2 recognizes the PAM sequence 5′-NTTN-3′. In some embodiments, the effector protein set forth in SEQ ID NO: 35, 2950, 3010, 3011, or 3012 recognizes the PAM sequence 5′-NNTR-3′. In some embodiments, the effector protein set forth in SEQ ID NO: 35 recognizes the PAM sequence 5′-NNTN-3′. PAMs used in compositions, systems, and methods herein are further described throughout the application.

### B. Effector Partners

[0133] Provided herein are compositions, systems, and methods comprising one or more effector partners or uses thereof. In some embodiments, the effector partner is a heterologous protein an effector protein described herein. In some embodiments, the effector partner is not an effector protein as described herein. In some embodiments, the effector partner is capable of imparting a function or activity that is not provided by an effector protein as described herein. In some embodiments, the effector partner comprises a second effector protein or a multimeric form thereof.

[0134] In some embodiments, an effector partner comprises a chromatin-modifying enzyme. In some embodiments, the effector partner chemically modifies a target nucleic acid, for example by methylating or acetylating the target nucleic acid in a sequence specific or non-specific manner. In some embodiments, an effector partner imparts a function or activity to a fusion protein comprising an effector protein that is not provided by the effector protein, including but not limited to methyltransferase activity.

[0135] In some embodiments, the effector partner is fused or linked to an effector protein described herein. In some embodiments, the amino terminus of the effector partner is linked to the carboxy terminus of the effector protein directly or by a linker. In some embodiments, the carboxy terminus of the effector partner is linked to the amino terminus of the effector protein directly or by a linker. In some embodiments, the effector partner may be functional when the effector protein is coupled to a guide nucleic acid. In some embodiments, the effector partner may be functional when the effector protein is coupled to a target nucleic acid. In some embodiments, the guide nucleic acid imparts sequence specific activity to the effector partner. By way of non-limiting example, the effector protein may comprise a catalytically inactive effector protein (e.g., a catalytically inactive variant of an effector protein described herein) when fused or linked to an effector partner.

[0136] In some embodiments, the effector partner modifies proteins associated with a target nucleic acid. In some embodiments, an effector partner may modulate transcription (e.g., inhibits transcription) of a target nucleic acid. In yet another example, an effector partner may directly or indirectly inhibit or reduce expression of a target nucleic acid. In some embodiments, compositions, systems and fusion proteins comprise two effector partners. In some embodiments, the two effector partners comprise two methyltransferases. In some embodiments, the two effector partners comprise a methyltransferase and a KRAB domain.

[0137] In some embodiments, the effector partner comprises a protein that provides methyltransferase activity. In some embodiments, the effector partner comprises a methyltransferase. In general, a methyltransferase is an enzyme that transfers a methyl group to a target nucleic acid. In some embodiments, the methyltransferase transfers a methyl group to a 5-carbon of the base cytosine. Commercial kits are available for assaying methyltransferase activity. Non-limiting examples of methyltransferases are HhaI DNA m5c-methyltransferase (M.HhaI), DNA methyltransferase 1 (DNMT1), DNA methyltransferase 3a (DNMT3A), DNA methyltransferase 3b (DNMT3B), and DNA methyltransferase 3 like (DNMT3L). In some embodiments, the effector partner is DNMT3A. In some embodiments, the effector partner is DNMT3L. In some embodiments, compositions comprise DNMT3L and DNMT3A. In some embodiments, fusion proteins comprise DNMT3L and DNMT3A.

[0138] In some embodiments, the effector partner comprises an H3K9 methylase. In general, an H3K9 methylase transfers a methyl group to Histone H3 lysine nine. Non-limiting examples of H3K9 methylases are KRAB domains, HPlalpha, KAP1, G9a, and SUV39H1. In some embodiments, the effector partner comprises a domain of a zinc finger protein. In some embodiments, the domain of the zinc finger protein is a KRAB domain. In some embodiments, the effector partner comprises a repressor comprising a KRAB domain or a variant thereof. In some embodiments, the KRAB domain is from zinc finger protein 10 (ZNF10). In some embodiments, the KRAB domain is from zinc finger imprinted 3 (ZIM3). In some embodiments, the KRAB domain is from zinc finger protein 28 (ZFP28). In some embodiments, the KRAB domain is from zinc finger protein 37A (ZNF37A). In some embodiments, the KRAB domain is from zinc finger protein 181 (ZNF181). In some embodiments, the KRAB domain is from zinc finger protein 208 (ZNF208). In some embodiments, the KRAB domain is from zinc finger protein 248 (ZNF248). In some embodiments, the KRAB domain is from zinc finger protein 334 (ZNF334). In some embodiments, the KRAB domain is from zinc finger protein 432 (ZNF432). In some embodiments, the KRAB domain is from zinc finger protein 510 (ZNF510). In some embodiments, the KRAB domain is from zinc finger protein 568 (ZNF568). In some embodiments, the KRAB domain is from zinc finger protein 862 (ZNF862). In some embodiments, the KRAB domain is from zinc finger protein 791 (ZNF791).In some embodiments, the KRAB domain is from zinc finger protein 398, (ZNF398). In some embodiments, the KRAB domain is from zinc finger protein 197 (ZNF197). In some embodiments, the KRAB domain is from zinc finger protein 382 (ZNF382). In some embodiments, the KRAB domain is from zinc finger protein 496 (ZNF496). In some embodiments, the KRAB domain is from zinc finger protein 534 (ZNF534). In some embodiments, the KRAB domain is from zinc finger protein 701 (ZNF701). In some embodiments, the KRAB domain is from zinc finger protein 141 (ZNF141). In some embodiments, the KRAB domain is from zinc finger protein 808 (ZNF808). In some embodiments, the KRAB domain is from zinc finger protein 773 (ZNF773). In some embodiments, the KRAB domain is from zinc finger protein 175 (ZNF175). In some embodiments, the KRAB domain is from zinc finger protein 331 (ZNF331). In some embodiments, the KRAB domain is from zinc finger protein 487 (ZNF487). In some embodiments, the KRAB domain is from zinc finger protein 233 (ZNF233). In some embodiments, the KRAB domain is from ZNF33A protein (ZNF33A). In some embodiments, the KRAB domain is from zinc finger protein 589 (ZNF589). In some embodiments, the KRAB domain is from zinc finger protein 431 (ZNF431). In some embodiments, the KRAB domain is from zinc finger protein 91 (ZNF91). In some embodiments, the KRAB domain is from putative zinc finger protein 730, (ZNF730). In some embodiments, the KRAB domain is from zinc finger protein 43 (ZNF43). In some embodiments, the KRAB domain is from zinc finger protein 136 (ZNF136). In some embodiments, the KRAB domain is from zinc finger protein 785 (ZNF785). In some embodiments, the KRAB domain is from zinc finger protein 764 (ZNF764). In some embodiments, the KRAB domain is from zinc finger protein 585A (ZNF585A). In some embodiments, the KRAB domain is from zinc finger protein 688 (ZNF688). In some embodiments, the KRAB domain is from zinc finger protein 182 (ZNF182). In some embodiments, the KRAB domain is from zinc finger protein 420 (ZNF420). In some embodiments, the KRAB domain is from zinc finger protein 675 (ZNF675). In some embodiments, the KRAB domain is from zinc finger protein 473 (ZNF473). In some embodiments, the KRAB domain is from zinc finger protein 30 homolog (ZFP30). In some embodiments, the KRAB domain is from zinc finger protein 658 (ZNF658). In some embodiments, the KRAB domain is from zinc finger protein 418 (ZNF418). In some embodiments, the KRAB domain is from zinc finger protein 846 (ZNF846). In some embodiments, the KRAB domain is from zinc finger protein 160 (ZNF160). In some embodiments, the KRAB domain is from zinc finger protein 468 (ZNF468). In some embodiments, the KRAB domain is from zinc finger protein 331 (ZNF331). In some embodiments, the KRAB domain is from zinc finger protein 425 (ZNF425). In some embodiments, the KRAB domain is from zinc finger protein 2 (ZNF2). In some embodiments, the KRAB domain is from zinc finger protein 212 (ZIN212). In some embodiments, the KRAB domain is from zinc finger protein 225 (ZNF225). In some embodiments, the KRAB domain is from zinc finger protein 568 (ZNF568). In some embodiments, the KRAB domain is from zinc finger protein 33A (ZNF33A). In some embodiments, the KRAB domain is from zinc finger protein 415 (ZNF415). In some embodiments, the KRAB domain is from zinc finger protein 548 (ZNF548). In some embodiments, the KRAB domain is from zinc finger protein 707 (ZNF707). In some embodiments, the KRAB domain is from zinc finger protein 721 (ZNF721). In some embodiments, the KRAB domain is from zinc finger protein 26 (ZNF26). In some embodiments, the KRAB domain is from zinc finger protein 461 (ZNG461). In some embodiments, the KRAB domain is from zinc finger protein 140 (ZNF140). In some embodiments, the KRAB domain is from zinc finger protein 707 (ZNF707). In some embodiments, the KRAB domain is from zinc finger protein 790 (ZNF790). In some embodiments, the KRAB domain is from zinc finger protein 717 (ZNF717). In some embodiments, the KRAB domain is from zinc finger protein 226 (ZNF226). In some embodiments, the KRAB domain is from zinc finger protein 19 (ZNF19). In some embodiments, the KRAB domain is from zinc finger protein 667 (ZNF667). In some embodiments, the KRAB domain is from zinc finger protein 789 (ZNF789). In some embodiments, the KRAB domain is from zinc finger protein 514 (ZNF514). In some embodiments, the KRAB domain is from zinc finger protein 677 (ZNF677). In some embodiments, the KRAB domain is from zinc finger protein 28 (ZNF28). In some embodiments, the KRAB domain is from zinc finger protein 83 (ZNF83). In some embodiments, the KRAB domain is from zinc finger protein 284 (ZNF284). In some embodiments, the KRAB domain is from zinc finger protein 324B, (ZNF324B). In some embodiments, the KRAB domain is from zinc finger protein 230 (ZNF230). In some embodiments, the KRAB domain is from zinc finger protein 115 (ZNF115). In some embodiments, the KRAB domain is from zinc finger protein 587B (ZNF587B). In some embodiments, the KRAB domain is from zinc finger protein 571 (ZNF571). In some embodiments, the KRAB domain is from zinc finger protein 233 (ZNF233). In some embodiments, the KRAB domain is from zinc finger protein 285 (ZNF285). In some embodiments, the KRAB domain is from zinc finger protein 320 (ZNF320). In some embodiments, the KRAB domain is from zinc finger protein 569 (ZNF569). In some embodiments, the KRAB domain is from zinc finger protein 84 (ZNF84). In some embodiments, the KRAB domain is from ZNF167 protein (ZNF167). In some embodiments, the KRAB domain is from zinc finger protein 234 (ZNF234). In some embodiments, the KRAB domain is from zinc finger protein 426 (ZNF426). In some embodiments, the KRAB domain is from zinc finger protein 264 (ZNF264). In some embodiments, the KRAB domain is from zinc finger protein 700 (ZNF700). In some embodiments, the KRAB variant comprises one or more substitutions relative to the wildtype KRAB. In some embodiments, the one or more substitutions are at the KRAB N terminus. In some embodiments, the repressor comprises a KRAB variant from ZNF10 comprising AW7EE substitutions (i.e., KRAB(ZNF10)_AW7EE). In some embodiments, the repressor comprises a KRAB variant from ZNF10 comprising WSR8EEE substitutions (i.e., KRAB(ZNF10)_WSR8EEE). In some embodiments, the repressor comprises a KRAB variant from ZNF791 comprising codopt1 substitutions (i.e., KRAB(ZNF791)_codopt1). In some embodiments, the repressor comprises a KRAB variant from ZNF791 comprising codopt2 substitutions (i.e., KRAB(ZNF791)_codopt2).

[0139] In some embodiments, the effector partner comprises a repressor comprising a chromodomain or a variant thereof. Non-limiting examples of chromodomains include CBX1, CBX2, CBX3, CBX4, CBX5, CBX6, CBX7, CBX8, and MPP8. In some embodiments, the chromodomain variant comprises Q9D/K33E substitutions (i.e., CBX1VD, CBX2VD, CBX3VD, CBX4VD, CBX5VD, CBX6VD, CBX7VD, and CBX8VD).

[0140] In some embodiments, the effector partner comprises a repressor selected from Ring1 and YY1 binding protein (RYBP), YY1 associated factor 2 (YAF2), ANM2, cyclic AMP response element modulator (CREM), GS homeobox 2 (GSX2), methyl CpG binding protein 2 (MECP2), small ubiquitin-like modifier 1(SUMO1), small ubiquitin-like modifier 3 (SUMO3), small ubiquitin-like modifier 5 (SUMOS), methyl-CpG-binding domain (MBD)-containing protein 2B (MBD2B), heterochromatin protein 1 (HPla), Spalt Like Transcription Factor 1 (SALL1), Sin3a corepressor complex component (SDS3), and Synovial sarcoma, X breakpoint 2 (SSX2).

[0141] In some embodiments, the effector partner comprises one or more repressors selected from a KRAB domain or a variant thereof described herein, a chromodomain or a variant thereof described herein, RYBP, YAF2, ANM2, CREM, GSX2, MECP2, SUMO1, SUMO3, SUMOS, HPla, SALL1, SDS3, SSX2, and any combination thereof. In some embodiments, the effector partner comprises one or more repressors selected from KRAB(ZIM3), KRAB(ZNF10), KRAB(ZFP28), KRAB(ZNF37A), KRAB(ZNF181), KRAB(ZNF208), KRAB(ZNF248), KRAB(ZNF334), KRAB(ZNF432), KRAB(ZNF510), KRAB(ZNF568), KRAB(ZNF862), KRAB(ZNF791), KRAB(ZNF10)_AW7EE, KRAB(ZNF10)_WSR8EEE, KRAB(ZNF791)_codopt1, KRAB(ZNF791)_codopt2, CBX1, CBX2, CBX3, CBX4, CBX5, CBX6, CBX7, CBX8, MPP8, CBX1VD, CBX2VD, CBX3VD, CBX4VD, CBX5VD, CBX6VD, CBX7VD, CBX8VD, RYBP, YAF2, ANM2, CREM, GSX2, MECP2, SUMO1, SUMO3, SUMOS, MBD2B, HPla, SALL1, SDS3, SSX2, and any combination thereof. In some embodiments, two or more repressors are fused in tandem. In some embodiments, two or more repressors are fused by linkers.

[0142] In some embodiments, the effector partner comprises bipartite repressors selected from the combination of CBX1VD-KRAB(ZIM3), CBX2VD-KRAB(ZIM3), CBX3VD-KRAB(ZIM3), CBX4VD-KRAB(ZIM3), CBX5VD-KRAB(ZIM3), CBX6VD-KRAB(ZIM3), CBX7VD-KRAB(ZIM3), CBX8VD-KRAB(ZIM3), CREM-KRAB(ZNF10), CREM-MPP8, KRAB(ZNF10)-ANM2, KRAB(ZNF10)-CBX1, KRAB(ZNF10)-CBX3, KRAB(ZNF10)-CBX4, KRAB(ZNF10)-CBX5, KRAB(ZNF10)-GSX2, KRAB(ZNF10)-KRAB(ZFP28), KRAB(ZNF10)-KRAB(ZNF37A), KRAB(ZNF10)-KRAB(ZNF181) KRAB(ZNF10)-KRAB(ZNF248), KRAB(ZNF10)-KRAB(ZNF334), KRAB(ZNF10)-KRAB(ZNF432), KRAB(ZNF10)-KRAB(ZNF510), KRAB(ZNF10)-KRAB(ZNF568), KRAB(ZNF10)-KRAB(ZNF862), KRAB(ZNF10)-MeCP2, KRAB(ZNF10)-MPP8, KRAB(ZNF10)-RYBP, KRAB(ZNF10)-SUMO1, KRAB(ZNF10)-SUMO3, KRAB(ZNF10)-SUMOS, KRAB(ZNF10)-YAF2, KRAB(ZNF791)_codopt1-KRAB(ZNF791)_codopt2, MBD2B-HP1a, MBD2B-KRAB(ZNF10), SALL1-SDS3, and SUMO3-SSX2. TABLE 4 provides amino acid sequences of the exemplary bipartite repressors.

[0143] In some embodiments, the effector partner comprises an H3K27 methylase. In general, an H3K27 methylase transfers a methyl group to Histone H3 lysine 27. A non-limiting example of an H3K27 methylase is EZH2. EZH2 is a catalytic subunit of the polycomb repressive complex 2 (PRC2). The effector partner may comprise one or more components of the PRC complex.

[0144] It is understood that an effector partner may include an entire protein, or in some embodiments, may include a fragment of the protein (e.g., a functional domain). In some embodiments, the functional domain binds or interacts with a nucleic acid, including intramolecular and/or intermolecular secondary structures thereof (e.g., hairpins, stem-loops, etc.). The functional domain may interact transiently or irreversibly, directly, or indirectly. In some embodiments, a functional domain comprises a region of one or more amino acids in a protein that is required for an activity of the protein, or the full extent of that activity, as measured in an in vitro assay. Activities include but are not limited to nucleic acid binding, nucleic acid modifying, protein binding or combinations thereof. The absence of the functional domain, including mutations of the functional domain, would abolish or reduce activity.

[0145] In some embodiments, effector partners inhibit or reduce expression of a target nucleic acid. In some embodiments, effector partners reduce expression of the target nucleic acid relative to its expression in the absence of the effector partners. Relative expression, including transcription and RNA levels, may be assessed, quantified, and compared, e.g., by RT-qPCR. In some embodiments, effector partners may comprise a transcriptional repressor. In some embodiments, the transcriptional repressors may inhibit transcription by: recruitment of other transcription factor proteins; modification of target DNA such as methylation; recruitment of a DNA modifier; modulation of histones associated with target DNA; recruitment of a histone modifier such as those that modify acetylation and/or methylation of histones; or a combination thereof.

[0146] In some embodiments, an effector partner provided herein comprises any one of the amino acid sequences recited in TABLE 4. Effector partners used in compositions, systems, and methods herein are further described throughout the application.

### Linkers

[0147] In some embodiments, effector proteins and effector partners are directly linked via a covalent bond. In some embodiments, In some embodiments, effector proteins and effector partners are linked via a molecule, also referred to as a “linker.” The linker may comprise or consist of a chemical group. In some embodiments, the linker comprises an amino acid. In some embodiments, a peptide linker comprises at least two amino acids linked by an amide bond. In general, the linker connects a terminus of the effector protein to a terminus of the fusion partner. In some embodiments, carboxy terminus of the effector protein is linked to the amino terminus of the fusion partner. In some embodiments, carboxy terminus of the fusion partner is linked to the amino terminus of the effector protein. In some embodiments, the effector protein and the fusion partner are directly linked by a covalent bond.

[0148] In some embodiments, linkers comprise one or more amino acids. In some embodiments, linker is a protein. In some embodiments, a terminus of the effector protein is linked to a terminus of the fusion partner through an amide bond. In some embodiments, a terminus of the effector protein is linked to a terminus of the fusion partner through a peptide bond. In some embodiments, linkers comprise an amino acid. In some embodiments, linkers comprise a peptide. In some embodiments, an effector protein is coupled to a fusion partner by a linker protein. In some embodiments, the linker may have any of a variety of amino acid sequences. In some embodiments, the linker may comprise a region of rigidity (e.g., beta sheet, alpha helix), a region of flexibility, or any combination thereof. In some embodiments, the linker comprises small amino acids, such as glycine and alanine, that impart high degrees of flexibility. The ordinarily skilled artisan will recognize that design of a peptide conjugated to any desired element may include linkers that are all or partially flexible, such that the linker may include a flexible linker as well as one or more portions that confer less flexible structure. Suitable linkers include proteins of 4 linked amino acids to 40 linked amino acids in length, or between 4 linked amino acids and 25 linked amino acids in length. In some embodiments, linked amino acids described herein comprise at least two amino acids linked by an amide bond.

[0149] Linkers may be produced by using synthetic, linker-encoding oligonucleotides to couple proteins, or may be encoded by a nucleic acid sequence encoding a fusion protein (e.g., an effector protein coupled to a fusion partner). In some embodiments, the linker is from 1 to 100 amino acids in length. In some embodiments, the linker is more 100 amino acids in length. In some embodiments, the linker is from 10 to 27 amino acids in length. In some embodiments, linker proteins include glycine polymers (G)n, glycine-serine polymers (including, for example, (GS)n, GSGGSn (SEQ ID NO:26), GGSGGSn (SEQ ID NO:27), and GGGSn (SEQ ID NO:28), where n is an integer of at least one), glycine-alanine polymers, and alanine-serine polymers. In some embodiments, linkers may comprise amino acid sequences including, but not limited to, GGSG (SEQ ID NO:29), GGSGG (SEQ ID NO:30), GSGSG (SEQ ID NO:31), GSGGG (SEQ ID NO:32), GGGSG (SEQ ID NO:33), and GSSSG (SEQ ID NO:34). In some embodiments, the linker comprises one or more repeats a tri-peptide GGS. In some embodiments, the linker is an XTEN linker. In some embodiments, the XTEN linker is an XTEN80 linker. In some embodiments, the XTEN linker is an XTEN20 linker.

[0150] In some embodiments, linkers do not comprise an amino acid. In some embodiments, linkers do not comprise a peptide. In some embodiments, linkers comprise a nucleotide, a polynucleotide, a polymer, or a lipid. In some embodiments, linker may be a polyethylene glycol (PEG), polypropylene glycol (PPG), co-poly(ethylene/propylene) glycol, polyoxyethylene (POE), polyurethane, polyphosphazene, polysaccharides, dextran, polyvinyl alcohol, polyvinylpyrrolidones, polyvinyl ethyl ether, polyacrylamide, polyacrylate, polycyanoacrylates, lipid polymers, chitins, hyaluronic acid, heparin, or an alkyl linker.

[0151] In some embodiments, a linker is recognized and cleaved by a protein described herein. In some embodiments, a linker comprises a recognition sequence that may be recognized and cleaved by the protein. In some embodiments, a guide nucleic acid comprises an aptamer, which may serve a similar function as a linker, bringing an effector protein and an effector partner protein into proximity. The aptamer can functionally connect two proteins (e.g., effector protein, effector partner) by interacting non-covalently with both, thereby bringing both proteins into proximity of the guide nucleic acid. In some embodiments, the first protein and/or the second protein comprise or is covalently linked to an aptamer binding moiety. In some embodiments, the aptamer is a short single stranded DNA (ssDNA) or RNA (ssRNA) molecule capable of being bound be the aptamer binding moiety. In some embodiments, the aptamer is a molecule that is capable of mimicking antibody binding activity and may be classified as a chemical antibody. In some instances, the aptamer described herein refers to artificial oligonucleotides that bind one or more specific molecules. In some embodiments, aptamers exhibit a range of affinities (KD in the pM to μM range) with little or no off-target binding.

[0152] In some embodiments, a peptide linker provided herein comprises any one of the amino acid sequences recited in TABLE 5. Linkers used in compositions, systems, and methods herein are further described throughout the application.

### C. Engineered Proteins

[0153] In some embodiments, proteins (e.g., effector protein, effector partner) described herein have been modified (also referred to as an engineered protein). In some embodiments, a modification of the proteins may include addition of one or more amino acids, deletion of one or more amino acids, substitution of one or more amino acids, or combinations thereof. In some embodiments, the proteins disclosed herein are engineered proteins. Unless otherwise indicated, reference to the proteins throughout the present disclosure include engineered proteins thereof.

[0154] In some embodiments, proteins (e.g., effector protein, effector partner) described herein can be modified with the addition of one or more heterologous peptides or heterologous polypeptides (referred to collectively herein as a heterologous polypeptide). In some embodiments, the protein modified with the addition of one or more heterologous peptides or heterologous polypeptides may be referred to herein as a fusion protein. Such fusion proteins are described herein and throughout.

[0155] In some embodiments, a heterologous peptide or heterologous polypeptide comprises a subcellular localization signal. In some embodiments, a subcellular localization signal can be a nuclear localization signal (NLS). In some embodiments, the NLS facilitates localization of a nucleic acid, protein, or small molecule to the nucleus, when present in a cell that contains a nuclear compartment. TABLE 2 lists exemplary NLS sequences. In some embodiments, the subcellular localization signal is a nuclear export signal (NES), a sequence to keep the protein retained in the cytoplasm, a mitochondrial localization signal for targeting to the mitochondria, a chloroplast localization signal for targeting to a chloroplast, an ER retention signal, and the like. In some embodiments, the protein described herein is not modified with a subcellular localization signal so that the protein is not targeted to the nucleus, which can be advantageous depending on the circumstance (e.g., when the target nucleic acid is an RNA that is present in the cytosol).

[0156] In some embodiments, a heterologous peptide or heterologous polypeptide comprises a protein tag. In some embodiments, the protein tag is referred to as purification tag or a fluorescent protein. The protein tag may be detectable for use in detection of the protein and/or purification of the protein. Accordingly, in some embodiments, compositions, systems and methods comprise a protein tag or use thereof. Any suitable protein tag may be used depending on the purpose of its use. Non-limiting examples of protein tags include a fluorescent protein, a histidine tag, e.g., a 6XHis tag; a hemagglutinin (HA) tag; a FLAG tag; a Myc tag; and maltose binding protein (MBP). In some embodiments, the protein tag is a portion of MBP that can be detected and/or purified. Non-limiting examples of fluorescent proteins include green fluorescent protein (GFP), yellow fluorescent protein (YFP), red fluorescent protein (RFP), cyan fluorescent protein (CFP), mCherry, and tdTomato.

[0157] A heterologous polypeptide may be located at or near the amino terminus (N-terminus) of the protein (e.g., effector protein, effector partner) disclosed herein. A heterologous polypeptide may be located at or near the carboxy terminus (C-terminus) of the proteins disclosed herein. In some embodiments, a heterologous polypeptide is located internally in the protein described herein (i.e., is not at the N- or C-terminus of the protein described herein) at a suitable insertion site.

[0158] In some embodiments, protein (e.g., effector protein, effector partner) described herein comprises 1, 2, 3, 4, 5, 6, 7, 8, 9, 10, or more heterologous polypeptides at or near the N-terminus, 1, 2, 3, 4, 5, 6, 7, 8, 9, 10, or more heterologous polypeptides at or near the C-terminus, or a combination of these (e.g., one or more heterologous polypeptides at the amino-terminus and one or more heterologous polypeptides at the carboxy terminus). When more than one heterologous polypeptide is present, each may be selected independently of the others, such that a single heterologous polypeptide may be present in more than one copy and/or in combination with one or more other heterologous polypeptides present in one or more copies. In some embodiments, a heterologous polypeptide is considered near the N- or C-terminus when the nearest amino acid of the heterologous polypeptide is within about 1, 2, 3, 4, 5, 10, 15, 20, 25, 30, 40, 50, or more amino acids along the polypeptide chain from the N- or C-terminus.

[0159] Effector proteins may comprise one or more modifications that reduce the activity of the effector protein relative to a naturally occurring effector protein. An effector protein may have a 100%, 90%, 80%, 70%, 60%, 50%, 40%, 30%, 20%, 10%, 5%, 1%, or less, decrease of the activity of a naturally occurring counterpart. Decreased activity may be decreased catalytic activity (e.g., nuclease activity) as compared to a naturally-occurring counterpart.

### D. Fusion Proteins

[0160] In some embodiments, the present disclosure provides a fusion protein comprising an effector protein described herein and one or more effector partners described herein. In some embodiments, the fusion protein comprises, from N-terminus to C-terminus, an effector protein and one or more effector partners. In some embodiments, the fusion protein comprises, from N-terminus to C-terminus, one or more effector partners and an effector protein. In some embodiments, the fusion protein comprises, from N-terminus to C-terminus, one or more effector partners, an effector protein, and another one or more effector partners. Exemplary fusion protein sequences are provided in TABLE 6.

[0161] In some embodiments, the fusion protein described herein comprises an effector protein comprising an amino acid sequence that is at least 90%, 91%, 92%, 93%, 94%, 95%, 96%, 97%, 98%, or 99% identical to an amino acid sequence set forth in TABLE 1 and an effector partner comprising an amino acid sequence that is at least 90%, 91%, 92%, 93%, 94%, 95%, 96%, 97%, 98%, or 99% identical to an amino acid sequence set forth in TABLE 4. In some embodiments, the fusion protein described herein comprises an effector protein comprising or consisting of an amino acid sequence set forth in TABLE 1 and an effector partner comprising or consisting of an amino acid sequence set forth in TABLE 4.

[0162] In some embodiments, the fusion protein described herein comprises an effector protein comprising at least one amino acid alteration relative to the amino acid sequence of SEQ ID NO: 1, wherein the at least one amino acid substitution is selected from: L26R, L26K, A121Q, D369A, D369N, D658A, D658N, E567A, and E567Q, and a combination thereof. In some embodiments, the fusion protein described herein comprises an effector protein comprising two amino acid alterations relative to the amino acid sequence of SEQ ID NO: 1, wherein the amino acid substitutions are L26R and E567Q. In some embodiments, the fusion protein described herein comprises an effector protein comprising an amino acid sequence that is at least 90%, 91%, 92%, 93%, 94%, 95%, 96%, 97%, 98%, or 99% identical to an amino acid sequence of SEQ ID NO: 2. In some embodiments, the fusion protein described herein comprises an effector protein comprising the amino acid sequence of SEQ ID NO: 2.

[0163] In some embodiments, the fusion protein described herein comprises an effector protein comprising at least one amino acid alteration relative to the amino acid sequence of SEQ ID NO: 35, wherein the at least one amino acid substitution is selected from: D220R, E335Q, and a combination thereof. In some embodiments, the fusion protein described herein comprises an effector protein comprising two amino acid alterations relative to the amino acid sequence of SEQ ID NO: 35, wherein the amino acid substitutions are D220R and E335Q. In some embodiments, the fusion protein described herein comprises an effector protein comprising an amino acid sequence that is at least 90%, 91%, 92%, 93%, 94%, 95%, 96%, 97%, 98%, or 99% identical to an amino acid sequence of SEQ ID NO: 2950. In some embodiments, the fusion protein described herein comprises an effector protein comprising the amino acid sequence of SEQ ID NO: 2950. In some embodiments, the fusion protein described herein comprises an effector protein comprising an amino acid sequence that is at least 90%, 91%, 92%, 93%, 94%, 95%, 96%, 97%, 98%, or 99% identical to an amino acid sequence of SEQ ID NO: 3010. In some embodiments, the fusion protein described herein comprises an effector protein comprising the amino acid sequence of SEQ ID NO: 3010. In some embodiments, the fusion protein described herein comprises an effector protein comprising an amino acid sequence that is at least 90%, 91%, 92%, 93%, 94%, 95%, 96%, 97%, 98%, or 99% identical to an amino acid sequence of SEQ ID NO: 3011. In some embodiments, the fusion protein described herein comprises an effector protein comprising the amino acid sequence of SEQ ID NO: 3011. In some embodiments, the fusion protein described herein comprises an effector protein comprising an amino acid sequence that is at least 90%, 91%, 92%, 93%, 94%, 95%, 96%, 97%, 98%, or 99% identical to an amino acid sequence of SEQ ID NO: 3012. In some embodiments, the fusion protein described herein comprises an effector protein comprising the amino acid sequence of SEQ ID NO: 3012.

[0164] In some embodiments, the fusion protein comprises an amino acid sequence that is at least 90%, 91%, 92%, 93%, 94%, 95%, 96%, 97%, 98%, or 99% identical to an amino acid sequence set forth in TABLE 6. In some embodiments, the fusion protein comprises an amino acid sequence that is 100% identical to an amino acid sequence set forth in set forth in TABLE 6.

[0165] In some embodiments, the fusion protein comprises an effector protein described herein and one effector partner described herein. In some embodiments, the fusion protein comprises an effector protein comprising an amino acid sequence that is at least 90%, 91%, 92%, 93%, 94%, 95%, 96%, 97%, 98%, or 99% identical to an amino acid sequence set forth in TABLE 1 and one effector partner, wherein the effector partner comprises an amino acid sequence that is at least 90%, 91%, 92%, 93%, 94%, 95%, 96%, 97%, 98%, or 99% identical to an amino acid sequence set forth in TABLE 4. In some embodiments, the fusion protein comprises an effector protein comprising or consisting of an amino acid sequence set forth in TABLE 1 and one effector partner, wherein the effector partner comprises or consists of an amino acid sequence set forth in TABLE 4. In some embodiments, the fusion protein comprises an effector protein comprising an amino acid sequence that is at least 90%, 91%, 92%, 93%, 94%, 95%, 96%, 97%, 98%, or 99% identical to an amino acid sequence set forth in TABLE 1 and one effector partner, wherein the effector partner is selected from DNMT3L, DNMT3A, KRAB(ZNF10), and KRAB(ZIM3). In some embodiments, the effector partner is linked to the C-terminus or N-terminus of the effector protein.

[0166] In some embodiments, the fusion protein comprises an effector protein described herein and two effector partners described herein. In some embodiments, the fusion protein comprises an effector protein comprising an amino acid sequence that is at least 90%, 91%, 92%, 93%, 94%, 95%, 96%, 97%, 98%, or 99% identical to an amino acid sequence set forth in TABLE 1 and a first effector partner and a second effector partner, wherein the first effector partner and the second effector partner comprise an amino acid sequence that is at least 90%, 91%, 92%, 93%, 94%, 95%, 96%, 97%, 98%, or 99% identical to an amino acid sequence set forth in TABLE 4. In some embodiments, the fusion protein comprises an effector protein comprising or consisting of an amino acid sequence set forth in TABLE 1 and a first effector partner and a second effector partner, wherein the first effector partner and the second effector partner comprise or consist of an amino acid sequence set forth in TABLE 4. In some embodiments, the fusion protein comprises an effector protein comprising an amino acid sequence that is at least 90%, 91%, 92%, 93%, 94%, 95%, 96%, 97%, 98%, or 99% identical to an amino acid sequence set forth in TABLE 1 and a first effector partner and a second effector partner, wherein the first effector partner and the second effector partner are selected from DNMT3L, DNMT3A, KRAB(ZNF10), KRAB(ZIM3), YAF2, MPP8, RYBP, CBX3VD, and CBX5VD, and a combination thereof. In some embodiments, the fusion protein comprises an effector protein described herein, a first effector partner described herein and a second effector partner described herein, wherein the first effector partner is linked to the C-terminus of the effector protein, and wherein the second effector partner is linked to the N-terminus of the effector protein or the C-terminus of the first effector partner. In some embodiments, the fusion protein comprises an effector protein described herein, a first effector partner described herein and a second effector partner described herein, wherein the first effector partner is linked to the N-terminus of the effector protein, and wherein the second effector partner is linked to the N-terminus of the first effector partner.

[0167] In some embodiments, the fusion protein comprises an effector protein described herein and three effector partners described herein. In some embodiments, the fusion protein comprises an effector protein comprising an amino acid sequence that is at least 90%, 91%, 92%, 93%, 94%, 95%, 96%, 97%, 98%, or 99% identical to an amino acid sequence set forth in TABLE 1 and a first effector partner, a second effector partner and a third effector partner, wherein the first effector partner, the second effector partner and the third effector partner comprise an amino acid sequence that is at least 90%, 91%, 92%, 93%, 94%, 95%, 96%, 97%, 98%, or 99% identical to an amino acid sequence set forth in TABLE 4. In some embodiments, the fusion protein comprises an effector protein comprising or consisting of an amino acid sequence set forth in TABLE 1 and a first effector partner, a second effector partner and a third effector partner, wherein the first effector partner, the second effector partner and the third effector partner comprise or consist of an amino acid sequence set forth in TABLE 4. In some embodiments, the fusion protein comprises an effector protein comprising an amino acid sequence that is at least 90%, 91%, 92%, 93%, 94%, 95%, 96%, 97%, 98%, or 99% identical to an amino acid sequence set forth in TABLE 1 and a first effector partner, a second effector partner and a third effector partner, wherein the first effector partner, the second effector partner and the third effector partner are selected from DNMT3L, DNMT3A, KRAB(ZNF10), KRAB(ZIM3), YAF2, MPP8, RYBP, CBX3VD, and CBX5VD, and a combination thereof. In some embodiments, the fusion protein comprises an effector protein described herein, a first effector partner described herein, a second effector partner described herein and a third effector partner described herein, wherein the first effector partner is linked to the C-terminus of the effector protein, wherein the second effector partner is linked to the N-terminus of the effector protein, and wherein the third effector partner is linked to the C-terminus of the first effector partner or the N-terminus of the second effector partner. In some embodiments, the fusion protein comprises an effector protein described herein, a first effector partner described herein, a second effector partner described herein and a third effector partner described herein, wherein the first effector partner is linked to the C-terminus of the effector protein, wherein the second effector partner is linked to the C-terminus of the first effector partner, and wherein the third effector partner is linked to the C-terminus of the second effector partner. In some embodiments, the fusion protein comprises an effector protein described herein, a first effector partner described herein, a second effector partner described herein and a third effector partner described herein, wherein the first effector partner is linked to the N-terminus of the effector protein, wherein the second effector partner is linked to the N-terminus of the first effector partner, and wherein the third effector partner is linked to the N-terminus of the second effector partner.

[0168] In some embodiments, the fusion protein comprises an effector protein, a first effector partner, and a second effector partner. In some embodiments, the effector protein comprises dCasPhi12(L26R, E567Q) or a variant thereof described herein. In some embodiments, the first effector partner comprises DNMT3L or DNMT3A or a variant thereof described herein. In some embodiments, the second effector partner comprises bipartite repressors or a variant thereof described herein. In some embodiments, the first effector partner is linked to the C-terminus of the effector protein. In some embodiments, the second effector partner is linked to the C-terminus of the first effector partner. In some embodiments, the fusion protein comprises an effector protein comprising an amino acid sequence that is at least 90%, 91%, 92%, 93%, 94%, 95%, 96%, 97%, 98%, or 99% identical to an amino acid sequence of SEQ ID NO: 2, a first effector partner comprising an amino acid sequence that is at least 90%, 91%, 92%, 93%, 94%, 95%, 96%, 97%, 98%, or 99% identical to an amino acid sequence selected from SEQ ID NO: 10 and SEQ ID NO: 11, and a second effector partner comprising an amino acid sequence that is at least 90%, 91%, 92%, 93%, 94%, 95%, 96%, 97%, 98%, or 99% identical to an amino acid sequence of any of SEQ ID NOs: 12, 3005-3009. In some embodiments, the fusion protein comprises an effector protein comprising an amino acid sequence that is at least 90%, 91%, 92%, 93%, 94%, 95%, 96%, 97%, 98%, or 99% identical to an amino acid sequence of SEQ ID NO: 2, a first effector partner comprising an amino acid sequence that is at least 90%, 91%, 92%, 93%, 94%, 95%, 96%, 97%, 98%, or 99% identical to an amino acid sequence of SEQ ID NO: 11, and a second effector partner comprising an amino acid sequence that is at least 90%, 91%, 92%, 93%, 94%, 95%, 96%, 97%, 98%, or 99% identical to an amino acid sequence of SEQ ID NO: 3005. In some embodiments, the fusion protein comprises an effector protein comprising an amino acid sequence that is at least 90%, 91%, 92%, 93%, 94%, 95%, 96%, 97%, 98%, or 99% identical to an amino acid sequence of SEQ ID NO: 2, a first effector partner comprising an amino acid sequence that is at least 90%, 91%, 92%, 93%, 94%, 95%, 96%, 97%, 98%, or 99% identical to an amino acid sequence of SEQ ID NO: 11, and a second effector partner comprising an amino acid sequence that is at least 90%, 91%, 92%, 93%, 94%, 95%, 96%, 97%, 98%, or 99% identical to an amino acid sequence of SEQ ID NO: 3006. In some embodiments, the fusion protein comprises an effector protein comprising an amino acid sequence that is at least 90%, 91%, 92%, 93%, 94%, 95%, 96%, 97%, 98%, or 99% identical to an amino acid sequence of SEQ ID NO: 2, a first effector partner comprising an amino acid sequence that is at least 90%, 91%, 92%, 93%, 94%, 95%, 96%, 97%, 98%, or 99% identical to an amino acid sequence of SEQ ID NO: 11, and a second effector partner comprising an amino acid sequence that is at least 90%, 91%, 92%, 93%, 94%, 95%, 96%, 97%, 98%, or 99% identical to an amino acid sequence of SEQ ID NO: 3007. In some embodiments, the fusion protein comprises an effector protein comprising an amino acid sequence that is at least 90%, 91%, 92%, 93%, 94%, 95%, 96%, 97%, 98%, or 99% identical to an amino acid sequence of SEQ ID NO: 2, a first effector partner comprising an amino acid sequence that is at least 90%, 91%, 92%, 93%, 94%, 95%, 96%, 97%, 98%, or 99% identical to an amino acid sequence of SEQ ID NO: 11, and a second effector partner comprising an amino acid sequence that is at least 90%, 91%, 92%, 93%, 94%, 95%, 96%, 97%, 98%, or 99% identical to an amino acid sequence of SEQ ID NO: 3008. In some embodiments, the fusion protein comprises an effector protein comprising an amino acid sequence that is at least 90%, 91%, 92%, 93%, 94%, 95%, 96%, 97%, 98%, or 99% identical to an amino acid sequence of SEQ ID NO: 2, a first effector partner comprising an amino acid sequence that is at least 90%, 91%, 92%, 93%, 94%, 95%, 96%, 97%, 98%, or 99% identical to an amino acid sequence of SEQ ID NO: 11, and a second effector partner comprising an amino acid sequence that is at least 90%, 91%, 92%, 93%, 94%, 95%, 96%, 97%, 98%, or 99% identical to an amino acid sequence of SEQ ID NO: 3009. In some embodiments, the fusion protein comprises an effector protein comprising the amino acid sequence of SEQ ID NO: 2, a first effector partner comprising the amino acid sequence of SEQ ID NO: 11, and a second effector partner comprising an amino acid sequence of any of SEQ ID NOs: 3005-3009. In some embodiments, the fusion protein comprises an effector protein comprising the amino acid sequence of SEQ ID NO: 2, a first effector partner comprising the amino acid sequence of SEQ ID NO: 11, and a second effector partner comprising the amino acid sequence of SEQ ID NO: 3005. In some embodiments, the fusion protein comprises an effector protein comprising the amino acid sequence of SEQ ID NO: 2, a first effector partner comprising the amino acid sequence of SEQ ID NO: 11, and a second effector partner comprising the amino acid sequence of SEQ ID NO: 3006. In some embodiments, the fusion protein comprises an effector protein comprising the amino acid sequence of SEQ ID NO: 2, a first effector partner comprising the amino acid sequence of SEQ ID NO: 11, and a second effector partner comprising the amino acid sequence of SEQ ID NO: 3007. In some embodiments, the fusion protein comprises an effector protein comprising the amino acid sequence of SEQ ID NO: 2, a first effector partner comprising the amino acid sequence of SEQ ID NO: 11, and a second effector partner comprising the amino acid sequence of SEQ ID NO: 3008. In some embodiments, the fusion protein comprises an effector protein comprising the amino acid sequence of SEQ ID NO: 2, a first effector partner comprising the amino acid sequence of SEQ ID NO: 11, and a second effector partner comprising the amino acid sequence of SEQ ID NOs: 3009.

[0169] In some embodiments, the fusion protein comprises the effector protein comprising a Cas protein, the first effector partner comprising DNMT3L, and the second effector partner comprising bipartite repressors KRAB(ZNF10)-YAF2. In some embodiments, the fusion protein comprises the effector protein comprising a Cas protein, the first effector partner comprising an amino acid sequence that is at least 90%, 91%, 92%, 93%, 94%, 95%, 96%, 97%, 98%, or 99% identical to an amino acid sequence of SEQ ID NO: 11, and the second effector partner comprising an amino acid sequence that is at least 90%, 91%, 92%, 93%, 94%, 95%, 96%, 97%, 98%, or 99% identical to an amino acid sequence of any of SEQ ID NO: 3005. In some embodiments, the fusion protein comprises the effector protein comprising a Cas protein, the first effector partner comprising the amino acid sequence of SEQ ID NO: 11, and the second effector partner comprising an amino acid sequence of any of SEQ ID NO: 3005. In some embodiments, the fusion protein comprises the effector protein comprising a Cas protein, the first effector partner comprising DNMT3L, and the second effector partner comprising CBX3VD. In some embodiments, the second effector partner further comprises KRAB(ZIM3). In some embodiments, the fusion protein comprises the effector protein comprising a Cas protein, the first effector partner comprising DNMT3L, and the second effector partner comprising bipartite repressors CBX3VD-KRAB(ZIM3). In some embodiments, the fusion protein comprises the effector protein comprising a Cas protein, the first effector partner comprising an amino acid sequence that is at least 90%, 91%, 92%, 93%, 94%, 95%, 96%, 97%, 98%, or 99% identical to an amino acid sequence of SEQ ID NO: 11, and the second effector partner comprising an amino acid sequence that is at least 90%, 91%, 92%, 93%, 94%, 95%, 96%, 97%, 98%, or 99% identical to an amino acid sequence of any of SEQ ID NO: 3008. In some embodiments, the fusion protein comprises the effector protein comprising a Cas protein, the first effector partner comprising the amino acid sequence of SEQ ID NO: 11, and the second effector partner comprising an amino acid sequence of any of SEQ ID NO: 3008. In some embodiments, the fusion protein comprises the effector protein comprising a Cas protein, the first effector partner comprising DNMT3L, and the second effector partner comprising CBX5VD. In some embodiments, the second effector partner further comprises KRAB(ZIM3). In some embodiments, the fusion protein comprises the effector protein comprising a Cas protein, the first effector partner comprising DNMT3L, and the second effector partner comprising bipartite repressors CBX5VD-KRAB(ZIM3). In some embodiments, the fusion protein comprises the effector protein comprising a Cas protein, the first effector partner comprising an amino acid sequence that is at least 90%, 91%, 92%, 93%, 94%, 95%, 96%, 97%, 98%, or 99% identical to an amino acid sequence of SEQ ID NO: 11, and the second effector partner comprising an amino acid sequence that is at least 90%, 91%, 92%, 93%, 94%, 95%, 96%, 97%, 98%, or 99% identical to an amino acid sequence of any of SEQ ID NO: 3009. In some embodiments, the fusion protein comprises the effector protein comprising a Cas protein, the first effector partner comprising the amino acid sequence of SEQ ID NO: 11, and the second effector partner comprising an amino acid sequence of any of SEQ ID NO: 3009. In some embodiments, the Cas protein comprises an amino acid sequence that is at least 90%, 91%, 92%, 93%, 94%, 95%, 96%, 97%, 98%, or 99% identical to an amino acid sequence of SEQ ID NO: 1. In some embodiments, the Cas protein comprises the amino acid sequence of SEQ ID NO: 1. In some embodiments, the Cas protein comprises an amino acid sequence that is at least 90%, 91%, 92%, 93%, 94%, 95%, 96%, 97%, 98%, or 99% identical to an amino acid sequence of SEQ ID NO: 2. In some embodiments, the Cas protein comprises the amino acid sequence of SEQ ID NO: 2.

[0170] In some embodiments, the fusion protein comprises an amino acid sequence that is at least 90%, at least 95%, at least 97%, at least 98%, at least 99%, or 100% identical to a sequence selected from SEQ ID NOs: 16-21, 3004, 3013-3025.

### Synthesis, Isolation and Assaying

[0171] Effector proteins of the present disclosure may be synthesized, using any suitable method. In some embodiments, the effector proteins may be produced in vitro or by eukaryotic cells or by prokaryotic cells. In some embodiments, the effector proteins may be further processed by unfolding (e.g. heat denaturation, dithiothreitol reduction, etc.) and may be further refolded, using any suitable method. In some embodiments, the nucleic acid(s) encoding the effector proteins described herein, the recombinant nucleic acid(s) described herein, the vectors described herein may be produced in vitro or in vivo by eukaryotic cells or by prokaryotic cells.

[0172] Any suitable method of generating and assaying the effector proteins described herein may be used. Such methods include, but are not limited to, site-directed mutagenesis, random mutagenesis, combinatorial libraries, and other mutagenesis methods described herein (see, e.g., Sambrook et al., Molecular Cloning: A Laboratory Manual, Third Ed., Cold Spring Harbor Laboratory, New York (2001); Ausubel et al., Current Protocols in Molecular Biology, John Wiley and Sons, Baltimore, MD (1999); Gillman et al., Directed Evolution Library Creation: Methods and Protocols (Methods in Molecular Biology) Springer, 2nd ed (2014)). One non-limiting example of a method for preparing an effector protein is to express recombinant nucleic acids encoding the effector protein in a suitable microbial organism, such as a bacterial cell, a yeast cell, or other suitable cell, using methods well known in the art. Exemplary methods are also described in the Examples provided herein.

[0173] In some embodiments, an effector protein provided herein is an isolated effector protein. In some embodiments, the effector proteins may be isolated and purified for use in compositions, systems, and/or methods described herein. In some embodiments, methods described here may include the step of isolating effector proteins described herein. Any suitable method to provide isolated effector proteins described herein may be used in the present disclosure, for example, recombinant expression systems, precipitation, gel filtration, ion-exchange, reverse-phase and affinity chromatography, and the like. Other well-known methods are described in Deutscher et al., Guide to Protein Purification: Methods in Enzymology, Vol. 182, (Academic Press, (1990)). Alternatively, the isolated polypeptides of the present disclosure can be obtained using well-known recombinant methods (see, e.g., Sambrook et al., Molecular Cloning: A Laboratory Manual, Third Ed., Cold Spring Harbor Laboratory, New York (2001); and Ausubel et al., Current Protocols in Molecular Biology, John Wiley and Sons, Baltimore, MD (1999)). The methods and conditions for biochemical purification of a polypeptide described herein can be chosen by those skilled in the art, and purification monitored, for example, by a functional assay.

[0174] In some embodiments, compositions, systems, and methods described herein may further comprise a purification tag that can be attached to an effector protein, or a nucleic acid encoding the purification tag that can be attached to a nucleic acid encoding the effector protein as described herein. In some embodiments, the purification tag may be an amino acid sequence which can attach or bind with high affinity to a separation substrate and assist in isolating the protein of interest from its environment, which may be its biological source, such as a cell lysate. Attachment of the purification tag may be at the N or C terminus of the effector protein. Furthermore, an amino acid sequence recognized by a protease or a nucleic acid encoding for an amino acid sequence recognized by a protease, such as TEV protease or the HRV3C protease may be inserted between the purification tag and the effector protein, such that biochemical cleavage of the sequence with the protease after initial purification liberates the purification tag. Purification and/or isolation may be performed through high performance liquid chromatography (HPLC), exclusion chromatography, gel electrophoresis, affinity chromatography, or other purification technique. Non-limiting examples of purification tags are as described herein.

[0175] In some embodiments, effector proteins described herein are isolated from cell lysate. In some embodiments, the compositions described herein may comprise 20% or more by weight, 75% or more by weight, 95% or more by weight, or 99.5% or more by weight of an effector protein, related to the method of preparation of compositions described herein and its purification thereof, wherein percentages may be upon total protein content in relation to contaminants. Thus, in some embodiments, the effector protein is at least 80% pure, at least 85% pure, at least 90% pure, at least 95% pure, at least 98% pure, or at least 99% pure (e.g., free of contaminants, non-engineered proteins or other macromolecules, etc.).

### E. Guide Nucleic Acids

[0176] The compositions, systems, and methods of the present disclosure may comprise a guide nucleic acid or a use thereof. Unless otherwise indicated, compositions, systems and methods comprising guide nucleic acids or uses thereof, as described herein and throughout, include DNA molecules, such as expression vectors, that encode a guide nucleic acid. Accordingly, compositions, systems, and methods of the present disclosure comprise a guide nucleic acid or a nucleotide sequence encoding the guide nucleic acid. Guide nucleic acids are also referred to herein as “guide RNA.” A guide nucleic acid, as well as any components thereof (e.g., spacer sequence, repeat sequence, linker nucleotide sequence, handle sequence, intermediary sequence etc.) may comprise one or more deoxyribonucleotides, ribonucleotides, biochemically or chemically modified nucleotides (e.g., one or more engineered modifications as described herein), or any combinations thereof. Such nucleotide sequences described herein may be described as a nucleotide sequence of either DNA or RNA, however, no matter the form the sequence is described, it is readily understood that such nucleotide sequences can be revised to be RNA or DNA, as needed, for describing a sequence within a guide nucleic acid itself or the sequence that encodes a guide nucleic acid, such as a nucleotide sequence described herein for a vector. Similarly, disclosure of the nucleotide sequences described herein also discloses the complementary nucleotide sequence, the reverse nucleotide sequence, and the reverse complement nucleotide sequence, any one of which can be a nucleotide sequence for use in a guide nucleic acid as described herein. In some embodiments, a guide nucleic acid sequence(s) comprises one or more nucleotide alterations at one or more positions in any one of the sequences described herein. Alternative nucleotides can be any one or more of A, C, G, T or U, or a deletion, or an insertion.

[0177] A guide nucleic acid may comprise a naturally occurring sequence. A guide nucleic acid may comprise a non-naturally occurring sequence, wherein the sequence of the guide nucleic acid, or any portion thereof, may be different from the sequence of a naturally occurring guide nucleic acid. A guide nucleic acid of the present disclosure comprises one or more of the following: a) a single nucleic acid molecule; b) a DNA base; c) an RNA base; d) a modified base; e) a modified sugar; f) a modified backbone; and the like. Modifications are described herein and throughout the present disclosure (e.g., in the section entitled “Engineered Modifications”). A guide nucleic acid may be chemically synthesized or recombinantly produced by any suitable methods. Guide nucleic acids and portions thereof may be found in or identified from a CRISPR array present in the genome of a host organism or cell.

[0178] In general, the guide nucleic acid comprises a nucleotide sequence that is at least 80%, at least 85%, at least 90%, at least 95%, at least 98%, at least 99%, or 100% complementary to the target sequence. In some embodiments, the guide nucleic acid comprises at least 10 contiguous nucleotides that are complementary to the target sequence in the target nucleic acid. In some embodiments, guide nucleic acid comprises a spacer sequence that is at least 80%, at least 85%, at least 90%, at least 95%, at least 98%, at least 99%, or 100% complementary to the target sequence.

[0179] In general, a guide nucleic acid comprises a first region that is not complementary to a target nucleic acid (FR) and a second region is complementary to the target nucleic acid (SR), wherein the FR and the SR are heterologous to each other. In some embodiments, FR is located 5′ to SR (FR-SR). In some embodiments, SR is located 5′ to FR (SR-FR). In some embodiments, at least a portion of the FR interacts or binds to an effector protein. The portion of the guide nucleic acid that may be bound by an effector protein may be referred to as the “protein binding sequence.” The protein binding sequence may comprise a repeat sequence, an intermediary sequence, a handle sequence, or a combination thereof, all of which are described herein and throughout. In some embodiments, the SR comprises a spacer sequence, wherein the spacer sequence can interact in a sequence-specific manner with (e.g., has complementarity with, or can hybridize to a target sequence in) a target nucleic acid (e.g., the APOC3, PCSK9, or ANGPTL3 genes). In some embodiments, the spacer sequence comprises a sequence that is at least 65%, at least 70%, at least 75%, at least 80%, at least 85%, at least 90%, at least 95% or 100% complementary to a target sequence of a region from about 500 nucleotides upstream to about 500 nucleotides downstream of the transcriptional start site of a target nucleic acid (e.g., the APOC3, PCSK9, or ANGPTL3 genes).

[0180] In some embodiments, the first region, the second region, or both may be about 8 nucleic acids, about 10 nucleic acids, about 12 nucleic acids, about 14 nucleic acids, about 16 nucleic acids, about 18 nucleic acids, about 20 nucleic acids, about 22 nucleic acids, about 24 nucleic acids, about 26 nucleic acids, about 28 nucleic acids, about 30 nucleic acids, about 32 nucleic acids, about 34 nucleic acids, about 36 nucleic acids, about 38 nucleic acids, about 40 nucleic acids, about 42 nucleic acids, about 44 nucleic acids, about 46 nucleic acids, about 48 nucleic acids, or about 50 nucleic acids long.

[0181] In some embodiments, the first region, the second region, or both may be from about 8 to about 12, from about 8 to about 16, from about 8 to about 20, from about 8 to about 24, from about 8 to about 28, from about 8 to about 30, from about 8 to about 32, from about 8 to about 34, from about 8 to about 36, from about 8 to about 38, from about 8 to about 40, from about 8 to about 42, from about 8 to about 44, from about 8 to about 48, or from about 8 to about 50 nucleic acids long.

[0182] In some embodiments, the first region, the second region, or both may comprise a GC content of about 1%, about 5%, about 10%, about 15%, about 20%, about 25%, about 30%, about 40%, about 50%, about 60%, about 70%, about 80%, about 90%, about 95%, or about 99%. In some embodiments, the first region, the second region, or both may comprise a GC content of from about 1% to about 95%, from about 5% to about 90%, from about 10% to about 80%, from about 15% to about 70%, from about 20% to about 60%, from about 25% to about 50%, or from about 30% to about 40%.

[0183] In some embodiments, the first region, the second region, or both may have a melting temperature of about 38° C., about 40° C., about 42° C., about 44° C., about 46° C., about 48° C., about 50° C., about 52° C., about 54° C., about 56° C., about 58° C., about 60° C., about 62° C., about 64° C., about 66° C., about 68° C., about 70° C., about 72° C., about 74° C., about 76° C., about 78° C., about 80° C., about 82° C., about 84° C., about 86° C., about 88° C., about 90° C., or about 92° C. In some embodiments, the first region, the second region, or both may have a melting temperature of from about 35° C. to about 40° C., from about 35° C. to about 45° C., from about 35° C. to about 50° C., from about 35° C. to about 55° C., from about 35° C. to about 60° C., from about 35° C. to about 65° C., from about 35° C. to about 70° C., from about 35° C. to about 75° C., from about 35° C. to about 80° C., or from about 35° C. to about 85° C.

[0184] In some embodiments, the compositions, systems, and methods of the present disclosure further comprise an additional nucleic acid, wherein a portion of the additional nucleic acid at least partially hybridizes to the first region of the guide nucleic acid. In some embodiments, the additional nucleic acid is at least partially hybridized to the 5′ end of the second region of the guide nucleic acid. In some embodiments, an unhybridized portion of the additional nucleic acid, at least partially, interacts with an effector protein or polypeptide. In some embodiments, the compositions, systems, and methods of the present disclosure comprise a dual nucleic acid system comprising the guide nucleic acid and the additional nucleic acid as described herein.

[0185] The guide nucleic acid may also form complexes as described through herein. For example, a guide nucleic acid may hybridize to another nucleic acid, such as target nucleic acid, or a portion thereof. In another example, a guide nucleic acid may complex with an effector protein. In such embodiments, a guide nucleic acid-effector protein complex may be described herein as an RNP. In some embodiments, when in a complex, at least a portion of the complex may bind, recognize, and/or hybridize to a target nucleic acid. For example, when a guide nucleic acid and an effector protein are complexed to form an RNP, at least a portion of the guide nucleic acid hybridizes to a target sequence in a target nucleic acid. Those skilled in the art in reading the below specific examples of guide nucleic acids as used in RNPs described herein, will understand that in some embodiments, a RNP may hybridize to one or more target sequences in a target nucleic acid, thereby allowing the RNP to modify and/or recognize a target nucleic acid or sequence contained therein (e.g., PAM) or to modify and/or recognize non-target sequences depending on the guide nucleic acid, and in some embodiments, the effector protein, used.

[0186] In some embodiments, a guide nucleic acid may comprise or form intramolecular secondary structure (e.g., hairpins, stem-loops, etc.). In some embodiments, a guide nucleic acid comprises a stem-loop structure comprising a stem region and a loop region. In some embodiments, the stem region is 4 to 8 linked nucleotides in length. In some embodiments, the stem region is 5 to 6 linked nucleotides in length. In some embodiments, the stem region is 4 to 5 linked nucleotides in length. In some embodiments, the guide nucleic acid comprises a pseudoknot (e.g., a secondary structure comprising a stem, at least partially, hybridized to a second stem or half-stem secondary structure). An effector protein may recognize a guide nucleic acid comprising multiple stem regions. In some embodiments, the nucleotide sequences of the multiple stem regions are identical to one another. In some embodiments, the nucleotide sequences of at least one of the multiple stem regions is not identical to those of the others. In some embodiments, the guide nucleic acid comprises at least 2, at least 3, at least 4, or at least 5 stem regions.

[0187] In some embodiments, a guide nucleic acid comprises about: 10, 11, 12, 13, 14, 15, 16, 17, 18, 19, 20, 21, 22, 23, 24, 25, 26, 27, 28, 29, 30, 31, 32, 33, 34, 35, 36, 37, 38, 39, 40, 41, 42, 43, 44, 45, 46, 47, 48, 49, 50, 51, 52, 53, 54, 55, 56, 57, 58, 59, or 60 linked nucleotides. In general, a guide nucleic acid comprises at least: 10, 15, 20, 25, 30, 35, 40, 45, 50, 55, 60 linked nucleotides. In some embodiments, the guide nucleic acid has about 10 to about 60, about 20 to about 50, or about 30 to about 40 linked nucleotides.

[0188] In some embodiments, a guide nucleic acid comprises at least 10, 11, 12, 13, 14, 15, 16, 17, 18, 19, 20, 21, 22, 23, 24, 25, 26, 27, 28, 29, or 30 contiguous nucleotides that are complementary to a eukaryotic sequence. Such a eukaryotic sequence is a nucleotide sequence that is present in a host eukaryotic cell. Such a nucleotide sequence is distinguished from nucleotide sequences present in other host cells, such as prokaryotic cells, or viruses. Said sequences present in a eukaryotic cell can be located in a gene, an exon, an intron, a non-coding (e.g., promoter or enhancer) region, a selectable marker, tag, signal, and the like. In some embodiments, a target sequence is a eukaryotic sequence.

[0189] In some embodiments, a length of a guide nucleic acid is about 30 to about 120 linked nucleotides. In some embodiments, the length of a guide nucleic acid is about 40 to about 100, about 40 to about 90, about 40 to about 80, about 40 to about 70, about 40 to about 60, about 40 to about 50, about 50 to about 90, about 50 to about 80, about 50 to about 70, or about 50 to about 60 linked nucleotides. In some embodiments, the length of a guide nucleic acid is about 40, about 45, about 50, about 55, about 60, about 65, about 70 or about 75 linked nucleotides. In some embodiments, the length of a guide nucleic acid is greater than about 15, about 20, about 25, about 30, about 35, about 40, about 45, about 50, about 55, about 60, about 65, about 70 or about 75 linked nucleotides. In some embodiments, the length of a guide nucleic acid is not greater than about 40, about 45, about 50, about 55, about 60, about 65, about 70, about 75, about 80, about 85, about 90, about 95, about 100, about 105, about 110, about 115, about 120, or about 125 linked nucleotides.

[0190] In some embodiments, guide nucleic acids comprise additional elements that contribute additional functionality (e.g., stability, heat resistance, etc.) to the guide nucleic acid. Such elements may be one or more nucleotide alterations, nucleotide sequences, intermolecular secondary structures, or intramolecular secondary structures (e.g., one or more hair pin regions, one or more bulges, etc.).

[0191] In some embodiments, guide nucleic acids comprise one or more linkers connecting different nucleotide sequences as described herein. A linker may comprise 1, 2, 3, 4, 5, 6, 7, 8, 9, 10, or more nucleotides. A linker may be any suitable linker, examples of which are described herein.

[0192] In some embodiments, guide nucleic acids comprise one or more nucleotide sequences as described herein (e.g., TABLES 7-9). Such nucleotide sequences described herein (e.g., TABLES 7-9) may be described as a nucleotide sequence of either DNA or RNA, however, no matter the form of the sequence described, it is readily understood that such nucleotide sequences may be revised to be RNA or DNA, as needed, for describing a sequence within a guide nucleic acid itself or the sequence that encodes a guide nucleic acid, such as a nucleotide sequence described herein for a vector. Similarly, disclosure of the nucleotide sequences described herein (e.g., TABLES 7-9) also discloses the complementary nucleotide sequence, the reverse nucleotide sequence, and the reverse complement nucleotide sequence, any one of which may be a nucleotide sequence for use in a guide nucleic acid as described herein. In some embodiments, guide nucleic acid sequence(s) comprises one or more nucleotide alterations at one or more positions in any one of the sequences described herein. Alternative nucleotides may be any one or more of A, C, G, T or U, or a deletion, or an insertion.

[0193] In some embodiments, the guide nucleic acid comprises a nucleotide sequence that is capable of hybridizing to a target sequence in a target nucleic acid, wherein the target nucleic acid is any one of: a naturally occurring eukaryotic sequence, a naturally occurring prokaryotic sequence, a naturally occurring viral sequence, a naturally occurring bacterial sequence, a naturally occurring fungal sequence, an engineered eukaryotic sequence, an engineered prokaryotic sequence, an engineered viral sequence, an engineered bacterial sequence, an engineered fungal sequence, a fragment of a naturally occurring sequence, a fragment of an engineered sequence, and combinations thereof. In some embodiments, the target sequence is only found in a eukaryote in nature. In some embodiments, the target sequence is only found in a human in nature.

[0194] In some embodiments, the guide nucleic acid is isolated from any one of: a naturally occurring cell, a eukaryotic cell, a prokaryotic cell, a plant cell, a fungal cell, an animal cell, cell of an invertebrate, a fly cell, a cell of a vertebrate, a mammalian cell, a primate cell, a non-human primate cell, a human cell, a living cell, a non-living cell, a modified cell, a derived cell, and a non-naturally occurring cell.

### Repeat Sequence

[0195] Guide nucleic acids described herein may comprise one or more repeat sequences. In some embodiments, a repeat sequence comprises a nucleotide sequence that is not complementary to a target sequence of a target nucleic acid. In some embodiments, a repeat sequence comprises a nucleotide sequence that may interact with an effector protein. In some embodiments, a repeat sequence is connected to another sequence of a guide nucleic acid, such as an intermediary sequence, that is capable of non-covalently interacting with an effector protein. In some embodiments, a repeat sequence includes a nucleotide sequence that is capable of forming a guide nucleic acid-effector protein complex (e.g., a RNP complex).

[0196] In some embodiments, the repeat sequence is between 10 and 50, 12 and 48, 14 and 46, 16 and 44, and 18 and 42 nucleotides in length.

[0197] In some embodiments, a repeat sequence is adjacent to a spacer sequence. In some embodiments, a repeat sequence is followed by a spacer sequence in the 5′ to 3′ direction. In some embodiments, a repeat sequence is preceded by a spacer sequence in the 5′ to 3′ direction. In some embodiments, a repeat sequence is adjacent to an intermediary sequence. In some embodiments, a repeat sequence is 3′ to an intermediary sequence. In some embodiments, an intermediary sequence is followed by a repeat sequence, which is followed by a spacer sequence in the 5′ to 3′ direction. In some embodiments, a repeat sequence is linked to a spacer sequence and/or an intermediary sequence. In some embodiments, a guide nucleic acid comprises a repeat sequence linked to a spacer sequence and/or to an intermediary sequence, which may be a direct link or by any suitable linker, examples of which are described herein.

[0198] In some embodiments, guide nucleic acids comprise more than one repeat sequence (e.g., two or more, three or more, or four or more repeat sequences). In some embodiments, a guide nucleic acid comprises more than one repeat sequence separated by another sequence of the guide nucleic acid. For example, in some embodiments, a guide nucleic acid comprises two repeat sequences, wherein the first repeat sequence is followed by a spacer sequence, and the spacer sequence is followed by a second repeat sequence in the 5′ to 3′ direction. In some embodiments, the more than one repeat sequences are identical. In some embodiments, the more than one repeat sequences are not identical.

[0199] In some embodiments, the repeat sequence comprises two sequences that are complementary to each other and hybridize to form a double stranded RNA duplex (dsRNA duplex). In some embodiments, the two sequences are not directly linked and hybridize to form a stem loop structure. In some embodiments, the dsRNA duplex comprises 5, 10, 15, 20 or 25 base pairs (bp). In some embodiments, not all nucleotides of the dsRNA duplex are paired, and therefore the duplex forming sequence may include a bulge. In some embodiments, the repeat sequence comprises a hairpin or stem-loop structure, optionally at the 5′ portion of the repeat sequence. In some embodiments, a strand of the stem portion comprises a sequence and the other strand of the stem portion comprises a sequence that is, at least partially, complementary. In some embodiments, such sequences may have 65% to 100% complementarity (e.g., 65%, 70%, 75%, 80%, 85%, 90%, 95%, or 100% complementarity). In some embodiments, a guide nucleic acid comprises nucleotide sequence that when involved in hybridization events may hybridize over one or more segments such that intervening or adjacent segments are not involved in the hybridization event (e.g., a bulge, a loop structure or hairpin structure, etc.).

[0200] In some embodiments, a repeat sequence comprises a nucleotide sequence that is at least 65%, at least 70%, at least 75%, at least 80%, at least 85%, at least 90%, at least 95%, at least 97%, or at least 98%, at least 99%, or 100% identical to an equal length portion of any one of the repeat sequences in TABLE 7. In some embodiments, the repeat sequence is at least 85% identical to any one of sequences set forth in TABLE 7. In some embodiments, a repeat sequence comprises at least 5, at least 6, at least 7, at least 8, at least 9, at least 10, at least 11, at least 12, at least 13, at least 14, at least 15, at least 16, at least 17, at least 18, at least 19, at least 20, or at least 21 contiguous nucleotides of any one of the sequences recited in TABLE 7. In some embodiments, a repeat sequence comprises one or more nucleotide alterations at one or more positions in the sequence recited in TABLE 7. Alternative nucleotides can be any one or more of A, C, G, T or U, or a deletion, or an insertion.

[0201] In some embodiments, the effector protein is at least 90%, at least 95%, at least 98%, at least 99% or 100% identical to SEQ ID NO: 1 or 2, and the repeat sequence is at least 90%, at least 95%, at least 98%, at least 99% or 100% identical to any one of the nucleotide sequence of SEQ ID NOs: 5-9. In some embodiments, the effector protein is at least 90%, at least 95%, at least 98%, at least 99% or 100% identical to SEQ ID NO: 1, and the protein binding sequence is at least 90%, at least 95%, at least 98%, at least 99% or 100% identical to any one of the nucleotide sequence of SEQ ID NOs: 5-9.

### Spacer Sequence

[0202] Guide nucleic acids described herein may comprise one or more spacer sequences. In some embodiments, a spacer sequence is capable of hybridizing to a target sequence of a target nucleic acid. In some embodiments, a spacer sequence comprises a nucleotide sequence that is, at least partially, hybridizable to an equal length of a sequence (e.g., a target sequence) of a target nucleic acid. In some embodiments, a spacer sequence is at least 90% complementary to a target sequence in a eukaryotic genome, wherein the eukaryotic genome is a human genome. Exemplary hybridization conditions are described herein. In some embodiments, the spacer sequence may function to direct an RNP complex comprising the guide nucleic acid to the target nucleic acid for detection and/or modification. The spacer sequence may function to direct a RNP to the target nucleic acid for detection and/or modification. A spacer sequence may be complementary to a target sequence that is adjacent to a PAM that is recognizable by an effector protein described herein.

[0203] In some embodiments, a spacer sequence comprises at least 5 to about 50 contiguous nucleotides that are complementary to a target sequence in a target nucleic acid. In some embodiments, a spacer sequence comprises at least 5 to about 50 linked nucleotides. In some embodiments, a spacer sequence comprises at least 5 to about 50, at least 5 to about 25, at least about 10 to at least about 25, or at least about 15 to about 25 linked nucleotides. In some embodiments, the spacer sequence comprises 15-28 linked nucleotides. In some embodiments, a spacer sequence comprises 15-26, 15-24, 15-22, 15-20, 15-18, 16-28, 16-26, 16-24, 16-22, 16-20, 16-18, 17-26, 17-24, 17-22, 17-20, 17-18, 18-26, 18-24, or 18-22 linked nucleotides. In some embodiments, the spacer sequence comprises 10, 11, 12, 13, 14, 15, 16, 17, 18, 19, 20, 21, 22, 23, 24, 25, 26, 27, 28, 29, 30, or more nucleotides.

[0204] In some embodiments, a spacer sequence is adjacent to a repeat sequence. In some embodiments, a spacer sequence follows a repeat sequence in a 5′ to 3′ direction. In some embodiments, a spacer sequence precedes a repeat sequence in a 5′ to 3′ direction. In some embodiments, the spacer sequence(s) and the repeat sequence(s) of the guide nucleic acid are present within the same molecule. In some embodiments, the spacer(s) and repeat sequence(s) are linked directly to one another. In some embodiments, a linker is present between the spacer(s) and repeat sequences. Linkers may be any suitable linker. In some embodiments, the spacer sequence(s) and the repeat sequence(s) of the guide nucleic acid are present in separate molecules, which are joined to one another by base pairing interactions.

[0205] In some embodiments, a spacer sequence comprises a nucleotide sequence that is at least 65%, at least 70%, at least 75%, at least 80%, at least 85%, at least 90%, at least 95% or 100% complementary to a target sequence of a target nucleic acid. A spacer sequence is capable of hybridizing to an equal length portion of a target nucleic acid (e.g., a target sequence). In some embodiments, a target nucleic acid, such as DNA or RNA, may be a cancer gene or gene associated with a genetic disorder, or an amplicon thereof, as described herein.

[0206] In some embodiments, a spacer sequence comprises a sequence that is at least 65%, at least 70%, at least 75%, at least 80%, at least 85%, at least 90%, at least 95% or 100% complementary to a target sequence of a region from about 500 nucleotides upstream to about 500 nucleotides downstream of the transcriptional start site of a APOC3 gene. In some embodiments, a spacer sequence comprises a sequence that is at least 65%, at least 70%, at least 75%, at least 80%, at least 85%, at least 90%, at least 95% or 100% complementary to a target sequence of a region from about 500 nucleotides upstream to about 500 nucleotides downstream of the transcriptional start site of a PCKS9 gene. In some embodiments, a spacer sequence comprises a sequence that is at least 65%, at least 70%, at least 75%, at least 80%, at least 85%, at least 90%, at least 95% or 100% complementary to a target sequence of a region from about 500 nucleotides upstream to about 500 nucleotides downstream of the transcriptional start site of a ANGPTL3 gene.

[0207] TABLE 9 provides illustrative spacer sequences targeting human or mouse APOC3 for use with CasPhi.12 (SEQ ID NO: 1). In some embodiments, the spacer sequence comprises at least 70%, at least 80%, at least 90%, at least 91%, at least 92%, at least 93%, at least 94%, at least 95%, at least 96%, at least 97%, or at least 99%, or 100% sequence identity to any one of the nucleotide sequences of SEQ ID NOs: 37-109, and 360-456. In some embodiments, spacer sequences comprise at least 10, at least 11, at least 12, at least 13, at least 14, at least 15, at least 16, at least 17, at least 18, at least 19, or at least 20 contiguous nucleotides of a sequence selected from any one of SEQ ID NOs: 37-109, and 360-456.

[0208] TABLE 9 provides illustrative spacer sequences targeting human or mouse PCSK9 for use with CasPhi.12 (SEQ ID NO: 1). In some embodiments, the spacer sequence comprises at least 70%, at least 80%, at least 90%, at least 91%, at least 92%, at least 93%, at least 94%, at least 95%, at least 96%, at least 97%, or at least 99%, or 100% sequence identity to any one of the nucleotide sequences of SEQ ID NOs: 110-177 and 457-528. In some embodiments, spacer sequences comprise at least 10, at least 11, at least 12, at least 13, at least 14, at least 15, at least 16, at least 17, at least 18, at least 19, or at least 20 contiguous nucleotides of a sequence selected from any one of SEQ ID NOs: 110-177, or 457-528.

[0209] TABLE 9 provides illustrative spacer sequences targeting human ANGPTL3 for use with CasPhi.12 (SEQ ID NO: 1). In some embodiments, the spacer sequence comprises at least 70%, at least 80%, at least 90%, at least 91%, at least 92%, at least 93%, at least 94%, at least 95%, at least 96%, at least 97%, or at least 99%, or 100% sequence identity to any one of the nucleotide sequences of SEQ ID NOs: 178-359. In some embodiments, spacer sequences comprise at least 10, at least 11, at least 12, at least 13, at least 14, at least 15, at least 16, at least 17, at least 18, at least 19, or at least 20 contiguous nucleotides of a sequence selected from any one of SEQ ID NOs: 178-359.

[0210] TABLE 10 provides illustrative spacer sequences targeting human or mouse APOC3 for use with CasM.265466 (SEQ ID NO: 35). In some embodiments, the spacer sequence comprises at least 70%, at least 80%, at least 90%, at least 91%, at least 92%, at least 93%, at least 94%, at least 95%, at least 96%, at least 97%, or at least 99%, or 100% sequence identity to any one of the nucleotide sequences of SEQ ID NOs: 1021-1202, and 1583-1800. In some embodiments, spacer sequences comprise at least 10, at least 11, at least 12, at least 13, at least 14, at least 15, at least 16, at least 17, at least 18, at least 19, or at least 20 contiguous nucleotides of a sequence selected from any one of SEQ ID NOs: 1021-1202, and 1583-1800.

[0211] TABLE 10 provides illustrative spacer sequences targeting human or mouse PCSK9 for use with CasM.265466 (SEQ ID NO: 35). In some embodiments, the spacer sequence comprises at least 70%, at least 80%, at least 90%, at least 91%, at least 92%, at least 93%, at least 94%, at least 95%, at least 96%, at least 97%, or at least 99%, or 100% sequence identity to any one of the nucleotide sequences of SEQ ID NOs: 1203-1361 and 1801-1975. In some embodiments, spacer sequences comprise at least 10, at least 11, at least 12, at least 13, at least 14, at least 15, at least 16, at least 17, at least 18, at least 19, or at least 20 contiguous nucleotides of a sequence selected from any one of SEQ ID NOs: 1203-1361 and 1801-1975.

[0212] TABLE 10 provides illustrative spacer sequences targeting human ANGPTL3 for use with CasM.265466 (SEQ ID NO: 35). In some embodiments, the spacer sequence comprises at least 70%, at least 80%, at least 90%, at least 91%, at least 92%, at least 93%, at least 94%, at least 95%, at least 96%, at least 97%, or at least 99%, or 100% sequence identity to any one of the nucleotide sequences of SEQ ID NOs: 1362-1582. In some embodiments, spacer sequences comprise at least 10, at least 11, at least 12, at least 13, at least 14, at least 15, at least 16, at least 17, at least 18, at least 19, or at least 20 contiguous nucleotides of a sequence selected from any one of SEQ ID NOs: 1362-1582.

[0213] In some embodiments, a target nucleic acid is a gene selected from TABLE 11. In some embodiments, a spacer sequence comprises a sequence that is at least 65%, at least 70%, at least 75%, at least 80%, at least 85%, at least 90%, at least 95% or 100% complementary to a target sequence of a target nucleic acid selected from TABLE 11. In some embodiments, a target nucleic acid is a nucleic acid associated with a disease or syndrome set forth in TABLE 12. In some embodiments, a spacer sequence comprises a sequence that is at least 65%, at least 70%, at least 75%, at least 80%, at least 85%, at least 90%, at least 95% or 100% complementary to a target sequence of a target nucleic acid associated with a disease or syndrome set forth in TABLE 12. In some embodiments, the spacer sequence comprises at least 10, 11, 12, 13, 14, 15, 16, 17, 18, 19, 20, 21, 22, 23, 24, 25, 26, 27, 28, 29, or 30 contiguous nucleotides that are capable of hybridizing to the target sequence. In some embodiments, the spacer sequence comprises at least 10, 11, 12, 13, 14, 15, 16, 17, 18, 19, 20, 21, 22, 23, 24, 25, 26, 27, 28, 29, or 30 contiguous nucleotides that are complementary to the target sequence.

[0214] It is understood that the spacer sequence of a spacer sequence need not be 100% complementary to that of a target sequence of a target nucleic acid to hybridize or hybridize specifically to the target sequence. For example, the spacer sequence may comprise at least one alteration, such as a substituted or modified nucleotide, that is not complementary to the corresponding nucleotide of the target sequence. Spacer sequences are further described throughout herein.

### Linker for Nucleic Acids

[0215] In some embodiments, a guide nucleic acid for use with compositions, systems, and methods described herein comprises one or more linkers, or a nucleic acid encoding one or more linkers. In some embodiments, the guide nucleic acid comprises at least one, at least two, at least three, at least four, at least five, at least six, at least seven, at least eight, at least nine, or at least ten linkers. In some embodiments, the guide nucleic acid comprises one, two, three, four, five, six, seven, eight, nine, or ten linkers. In some embodiments, the guide nucleic acid comprises more than one linker. In some embodiments, at least two of the more than one linker are the same. In some embodiments, at least two of the more than one linker are not same.

[0216] In some embodiments, a linker comprises one to ten, one to seven, one to five, one to three, two to ten, two to eight, two to six, two to four, three to ten, three to seven, three to five, four to ten, four to eight, four to six, five to ten, five to seven, six to ten, six to eight, seven to ten, or eight to ten linked nucleotides. In some embodiments, the linker comprises one, two, three, four, five, six, seven, eight, nine, or ten linked nucleotides. In some embodiments, a linker comprises a nucleotide sequence of 5′-GAAA-3′.

[0217] In some embodiments, a guide nucleic acid comprises one or more linkers connecting one or more repeat sequences. In some embodiments, the guide nucleic acid comprises one or more linkers connecting one or more repeat sequences and one or more spacer sequences. In some embodiments, the guide nucleic acid comprises at least two repeat sequences connected by a linker.

### Intermediary Sequence

[0218] Guide nucleic acids described herein may comprise one or more intermediary sequences. In general, an intermediary sequence used in the present disclosure is not transactivated or transactivating. An intermediary sequence may also be referred to as an intermediary RNA, although it may comprise deoxyribonucleotides instead of or in addition to ribonucleotides, and/or modified bases. In general, the intermediary sequence non-covalently binds to an effector protein. In some embodiments, the intermediary sequence forms a secondary structure, for example in a cell, and an effector protein binds the secondary structure.

[0219] In some embodiments, a length of the intermediary sequence is at least 30, 50, 70, 90, 110, 130, 150, 170, 190, or 210 linked nucleotides. In some embodiments, a length of the intermediary sequence is not greater than 30, 50, 70, 90, 110, 130, 150, 170, 190, or 210 linked nucleotides. In some embodiments, the length of the intermediary sequence is about 30 to about 210, about 60 to about 210, about 90 to about 210, about 120 to about 210, about 150 to about 210, about 180 to about 210, about 30 to about 180, about 60 to about 180, about 90 to about 180, about 120 to about 180, or about 150 to about 180 linked nucleotides.

[0220] An intermediary sequence may also comprise or form a secondary structure (e.g., one or more hairpin loops) that facilitates the binding of an effector protein to a guide nucleic acid and/or modification activity of an effector protein on a target nucleic acid (e.g., a hairpin region). An intermediary sequence may comprise from 5′ to 3′, a 5′ region, a hairpin region, and a 3′ region. In some embodiments, the 5′ region may hybridize to the 3′ region. In some embodiments, the 5′ region of the intermediary sequence does not hybridize to the 3′ region.

[0221] In some embodiments, the hairpin region may comprise a first sequence, a second sequence that is reverse complementary to the first sequence, and a stem-loop linking the first sequence and the second sequence. In some embodiments, an intermediary sequence comprises a stem-loop structure comprising a stem region and a loop region. In some embodiments, the stem region is 4 to 8 linked nucleotides in length. In some embodiments, the stem region is 5 to 6 linked nucleotides in length. In some embodiments, the stem region is 4 to 5 linked nucleotides in length. In some embodiments, an intermediary sequence comprises a pseudoknot (e.g., a secondary structure comprising a stem at least partially hybridized to a second stem or half-stem secondary structure). An effector protein may interact with an intermediary sequence comprising a single stem region or multiple stem regions. In some embodiments, the nucleotide sequences of the multiple stem regions are identical to one another. In some embodiments, the nucleotide sequences of at least one of the multiple stem regions is not identical to those of the others. In some embodiments, an intermediary sequence comprises 1, 2, 3, 4, 5 or more stem regions.

### Handle Sequence

[0222] Guide nucleic acids described herein may comprise one or more handle sequences. In some embodiments, the handle sequence comprises an intermediary sequence. In such instances, at least a portion of an intermediary sequence non-covalently bonds with an effector protein. In some embodiments, the intermediary sequence is at the 3′-end of the handle sequence. In some embodiments, the intermediary sequence is at the 5′-end of the handle sequence. Additionally, or alternatively, in some embodiments, the handle sequence further comprises one or more of linkers and repeat sequences. In such instances, at least a portion of an intermediary sequence, or both of at least a portion of the intermediary sequence and at least a portion of repeat sequence, non-covalently interacts with an effector protein. In some embodiments, an intermediary sequence and repeat sequence are directly linked (e.g., covalently linked, such as through a phosphodiester bond). In some embodiments, the intermediary sequence and repeat sequence are linked by a suitable linker, examples of which are provided herein. In some embodiments, the linker comprises a sequence of 5′-GAAA-3′. In some embodiments, the intermediary sequence is 5′ to the repeat sequence. In some embodiments, the intermediary sequence is 5′ to the linker. In some embodiments, the intermediary sequence is 3′ to the repeat sequence. In some embodiments, the intermediary sequence is 3′ to the linker. In some embodiments, the repeat sequence is 3′ to the linker. In some embodiments, the repeat sequence is 5′ to the linker. In general, a single guide nucleic acid, also referred to as a single guide RNA (sgRNA), comprises a handle sequence comprising an intermediary sequence, and optionally one or more of a repeat sequence and a linker.

[0223] A handle sequence may comprise or form a secondary structure (e.g., one or more hairpin loops) that facilitates the binding of an effector protein to a guide nucleic acid and/or modification activity of an effector protein on a target nucleic acid (e.g., a hairpin region). In some embodiments, handle sequences comprise a stem-loop structure comprising a stem region and a loop region. In some embodiments, the stem region is 4 to 8 linked nucleotides in length. In some embodiments, the stem region is 5 to 6 linked nucleotides in length. In some embodiments, the stem region is 4 to 5 linked nucleotides in length. In some embodiments, the handle sequence comprises a pseudoknot (e.g., a secondary structure comprising a stem at least partially hybridized to a second stem or half-stem secondary structure). An effector protein may recognize a handle sequence comprising multiple stem regions. In some embodiments, the nucleotide sequences of the multiple stem regions are identical to one another. In some embodiments, the nucleotide sequences of at least one of the multiple stem regions is not identical to those of the others. In some embodiments, the handle sequence comprises at least 2, at least 3, at least 4, or at least 5 stem regions.

[0224] In some embodiments, a length of the handle sequence is at least 30, 50, 70, 90, 100, 110, 130, 150, 170, 190, or 210 linked nucleotides. In some embodiments, a length of the handle sequence is not greater than 30, 50, 70, 90, 100, 110, 130, 150, 170, 190, or 210 linked nucleotides. In some embodiments, the length of the handle sequence is about 30 to about 210, about 60 to about 210, about 90 to about 210, about 120 to about 210, about 150 to about 210, about 180 to about 210, about 30 to about 180, about 60 to about 180, about 90 to about 180, about 120 to about 180, or about 150 to about 180 linked nucleotides.

[0225] In some embodiments, a handle sequence comprises a nucleotide sequence that is at least 65%, at least 70%, at least 75%, at least 80%, at least 85%, at least 90%, at least 95%, at least 97%, or at least 98%, at least 99%, or 100% identical to an equal length portion of any one of the repeat sequences in TABLE 8. In some embodiments, the handle sequence is at least 85% identical to any one of sequences set forth in TABLE 8. In some embodiments, a handle sequence comprises one or more nucleotide alterations at one or more positions in the sequence recited in TABLE 8. Alternative nucleotides can be any one or more of A, C, G, T or U, or a deletion, or an insertion.

[0226] In some embodiments, the effector protein is at least 90%, at least 95%, at least 98%, at least 99% or 100% identical to SEQ ID NO: 35, 2950, 3010, 3011, or 3012, and the handle sequence is at least 90%, at least 95%, at least 98%, at least 99% or 100% identical to the nucleotide sequence of SEQ ID NO: 36.

### Exemplary Guide Nucleic Acid

[0227] In some embodiments, the guide nucleic acids disclosed herein comprise a spacer sequence that is at least 70%, at least 75%, at least 80%, at least 85%, at least 90%, at least 95%, or 100% identical to any one of the sequences as set forth in TABLE 9 and a repeat sequence that is at least 70%, at least 75%, at least 80%, at least 85%, at least 90%, at least 95%, or 100% identical to any one of the sequences of TABLE 7.

[0228] In some embodiments, the guide nucleic acids disclosed herein comprise a spacer sequence that is at least 70%, at least 75%, at least 80%, at least 85%, at least 90%, at least 95%, or 100% identical to any one of the sequences as set forth in TABLE 10 and a handle sequence that is at least 70%, at least 75%, at least 80%, at least 85%, at least 90%, at least 95%, or 100% identical to any one of the sequences of TABLE 8.

[0229] Exemplary guide nucleic acid sequences useful for systems, compositions and methods described herein are provided in TABLES 9 and 10. In some embodiments, the guide nucleic acid comprises a sequence that is at least 70%, at least 75%, at least 80%, at least 85%, at least 90%, at least 95%, or 100% identical to any one of the sequences of TABLES 9 and 10. In some embodiments, the guide nucleic acid consists of a sequence that is at least 70%, at least 75%, at least 80%, at least 85%, at least 90%, at least 95%, or 100% identical to any one of the sequences of TABLES 9 and 10. In some embodiments, the guide nucleic acids provided in TABLES 9 and 10 comprise an additional “G” at the 5′ end of the sequence.

[0230] In some embodiments, a guide nucleic acid to be used in combination with CasPhi.12 for targeting the human APOC3 gene comprises a sequence that is at least 70%, at least 75%, at least 80%, at least 85%, at least 90%, at least 95%, or 100% identical to any one of the sequences of SEQ ID NOs: 529-601. In some embodiments, a guide nucleic acid to be used in combination with CasPhi.12 for targeting the mouse APOC3 gene comprises a sequence that is at least 70%, at least 75%, at least 80%, at least 85%, at least 90%, at least 95%, or 100% identical to any one of the sequences of SEQ ID NOs: 852-948.

[0231] In some embodiments, a guide nucleic acid to be used in combination with CasPhi.12 for targeting the human PCSK9 gene comprises a sequence that is at least 70%, at least 75%, at least 80%, at least 85%, at least 90%, at least 95%, or 100% identical to any one of the sequences of SEQ ID NOs: 602-669. In some embodiments, a guide nucleic acid to be used in combination with CasPhi.12 for targeting the mouse PCSK9 gene comprises a sequence that is at least 70%, at least 75%, at least 80%, at least 85%, at least 90%, at least 95%, or 100% identical to any one of the sequences of SEQ ID NOs: 949-1020.

[0232] In some embodiments, a guide nucleic acid to be used in combination with CasPhi.12 for targeting the human ANGPTL3 gene comprises a sequence that is at least 70%, at least 75%, at least 80%, at least 85%, at least 90%, at least 95%, or 100% identical to any one of the sequences of SEQ ID NOs: 670-851.

[0233] In some embodiments, a guide nucleic acid to be used in combination with CasM.265466 for targeting the human APOC3 gene comprises a sequence that is at least 70%, at least 75%, at least 80%, at least 85%, at least 90%, at least 95%, or 100% identical to any one of the sequences of SEQ ID NOs: 1976-2157. In some embodiments, a guide nucleic acid to be used in combination with CasM.265466 for targeting the mouse APOC3 gene comprises a sequence that is at least 70%, at least 75%, at least 80%, at least 85%, at least 90%, at least 95%, or 100% identical to any one of the sequences of SEQ ID NOs: 2538-2755.

[0234] In some embodiments, a guide nucleic acid to be used in combination with CasM.265466 for targeting the human PCSK9 gene comprises a sequence that is at least 70%, at least 75%, at least 80%, at least 85%, at least 90%, at least 95%, or 100% identical to any one of the sequences of SEQ ID NOs: 2158-2316. In some embodiments, a guide nucleic acid to be used in combination with CasM.265466 for targeting the mouse PCSK9 gene comprises a sequence that is at least 70%, at least 75%, at least 80%, at least 85%, at least 90%, at least 95%, or 100% identical to any one of the sequences of SEQ ID NOs: 2756-2930.

[0235] In some embodiments, a guide nucleic acid to be used in combination with CasM.265466 for targeting the human ANGPTL3 gene comprises a sequence that is at least 70%, at least 75%, at least 80%, at least 85%, at least 90%, at least 95%, or 100% identical to any one of the sequences of SEQ ID NOs: 2317-2537.

### A Single Nucleic Acid System

[0236] In some embodiments, compositions, systems and methods described herein comprise a single nucleic acid system comprising a guide nucleic acid or a nucleotide sequence encoding the guide nucleic acid, and one or more effector proteins or a nucleotide sequence encoding the one or more effector proteins. In some embodiments, a first region (FR) of the guide nucleic acid non-covalently interacts with the one or more polypeptides described herein. In some embodiments, a second region (SR) of the guide nucleic acid hybridizes with a target sequence of the target nucleic acid. In the single nucleic acid system having a complex of the guide nucleic acid and the effector protein, the effector protein is not transactivated by the guide nucleic acid. In other words, activity of effector protein does not require binding to a second non-target nucleic acid molecule. An exemplary guide nucleic acid for a single nucleic acid system is a crRNA or a sgRNA.

crRNA

[0237] In some embodiments, a guide nucleic acid comprises a crRNA. In some embodiments, the guide nucleic acid is the crRNA. In general, a crRNA comprises a first region (FR) and a second region (SR), wherein the FR of the crRNA comprises a repeat sequence, and the SR of the crRNA comprises a spacer sequence. In some embodiments, the repeat sequence and the spacer sequences are directly connected to each other (e.g., covalent bond (phosphodiester bond)). In some embodiments, the repeat sequence and the spacer sequence are connected by a linker.

[0238] In some embodiments, a crRNA is useful as a single nucleic acid system for compositions, methods, and systems described herein or as part of a single nucleic acid system for compositions, methods, and systems described herein. In some embodiments, a crRNA is useful as part of a single nucleic acid system for compositions, methods, and systems described herein. In such embodiments, a single nucleic acid system comprises a guide nucleic acid comprising a crRNA wherein, a repeat sequence of a crRNA is capable of connecting a crRNA to an effector protein. In some embodiments, a single nucleic acid system comprises a guide nucleic acid comprising a crRNA linked to another nucleotide sequence that is capable of being non-covalently bond by an effector protein. In such embodiments, a repeat sequence of a crRNA can be linked to an intermediary sequence. In some embodiments, a single nucleic acid system comprises a guide nucleic acid comprising a crRNA and an intermediary sequence.

[0239] A crRNA may include deoxyribonucleosides, ribonucleosides, chemically modified nucleosides, or any combination thereof. In some embodiments, a crRNA comprises about: 10, 11, 12, 13, 14, 15, 16, 17, 18, 19, 20, 21, 22, 23, 24, 25, 26, 27, 28, 29, 30, 31, 32, 33, 34, 35, 36, 37, 38, 39, 40, 41, 42, 43, 44, 45, 46, 47, 48, 49, 50, 51, 52, 53, 54, 55, 56, 57, 58, 59, or 60 linked nucleotides. In some embodiments, a crRNA comprises at least: 10, 15, 20, 25, 30, 35, 40, 45, 50, 55, 60 linked nucleotides. In some embodiments, the length of the crRNA is about 20 to about 120 linked nucleotides. In some embodiments, the length of a crRNA is about 20 to about 100, about 30 to about 100, about 40 to about 100, about 40 to about 90, about 40 to about 80, about 40 to about 70, about 40 to about 60, about 40 to about 50, about 50 to about 90, about 50 to about 80, about 50 to about 70, or about 50 to about 60 linked nucleotides. In some embodiments, the length of a crRNA is about 20, about 25, about 30, about 35, about 40, about 45, about 50, about 55, about 60, about 65, about 70 or about 75 linked nucleotides.

sgRNA

[0240] In some embodiments, a guide nucleic acid comprises a sgRNA. In some embodiments, a guide nucleic acid is a sgRNA. In some embodiments, a sgRNA comprises a first region (FR) and a second region (SR), wherein the FR comprises a handle sequence and the SR comprises a spacer sequence. In some embodiments, the handle sequence and the spacer sequences are directly connected to each other (e.g., covalent bond (phosphodiester bond)). In some embodiments, the handle sequence and the spacer sequence are connected by a linker.

[0241] In some embodiments, a sgRNA comprises one or more of a handle sequence, an intermediary sequence, a crRNA, a repeat sequence, a spacer sequence, a linker, or combinations thereof. For example, a sgRNA comprises a handle sequence and a spacer sequence; an intermediary sequence and an crRNA; an intermediary sequence, a repeat sequence and a spacer sequence; and the like.

[0242] In some embodiments, a sgRNA comprises an intermediary sequence and an crRNA. In some embodiments, an intermediary sequence is 5′ to a crRNA in an sgRNA. In some embodiments, a sgRNA comprises a linked intermediary sequence and crRNA. In some embodiments, an intermediary sequence and a crRNA are linked in an sgRNA directly (e.g., covalently linked, such as through a phosphodiester bond) In some embodiments, an intermediary sequence and a crRNA are linked in an sgRNA by any suitable linker, examples of which are provided herein.

[0243] In some embodiments, a sgRNA comprises a handle sequence and a spacer sequence. In some embodiments, a handle sequence is 5′ to a spacer sequence in an sgRNA. In some embodiments, a sgRNA comprises a linked handle sequence and spacer sequence. In some embodiments, a handle sequence and a spacer sequence are linked in an sgRNA directly (e.g., covalently linked, such as through a phosphodiester bond) In some embodiments, a handle sequence and a spacer sequence are linked in an sgRNA by any suitable linker, examples of which are provided herein.

[0244] In some embodiments, a sgRNA comprises an intermediary sequence, a repeat sequence, and a spacer sequence. In some embodiments, an intermediary sequence is 5′ to a repeat sequence in an sgRNA. In some embodiments, a sgRNA comprises a linked intermediary sequence and repeat sequence. In some embodiments, an intermediary sequence and a repeat sequence are linked in an sgRNA directly (e.g., covalently linked, such as through a phosphodiester bond) In some embodiments, an intermediary sequence and a repeat sequence are linked in an sgRNA by any suitable linker, examples of which are provided herein. In some embodiments, a repeat sequence is 5′ to a spacer sequence in an sgRNA. In some embodiments, a sgRNA comprises a linked repeat sequence and spacer sequence. In some embodiments, a repeat sequence and a spacer sequence are linked in an sgRNA directly (e.g. covalently linked, such as through a phosphodiester bond) In some embodiments, a repeat sequence and a spacer sequence are linked in an sgRNA by any suitable linker, examples of which are provided herein.

### Dual Nucleic Acid Systems

[0245] In some embodiments, compositions, systems and methods described herein comprise a dual nucleic acid system comprising a crRNA or a nucleotide sequence encoding the crRNA, a tracrRNA or a nucleotide sequence encoding the tracrRNA, and one or more effector protein or a nucleotide sequence encoding the one or more effector protein, wherein the crRNA and the tracrRNA are separate, unlinked molecules, wherein a repeat hybridization region of the tracrRNA is capable of hybridizing with an equal length portion of the crRNA to form a tracrRNA-crRNA duplex, wherein the equal length portion of the crRNA does not include a spacer sequence of the crRNA, and wherein the spacer sequence is capable of hybridizing to a target sequence of the target nucleic acid. In the dual nucleic acid system having a complex of the guide nucleic acid, tracrRNA, and the effector protein, the effector protein is transactivated by the tracrRNA. In other words, activity of effector protein requires binding to a tracrRNA molecule. In some embodiments, the dual nucleic acid system comprises a guide nucleic acid and a tracrRNA, wherein the tracrRNA is an additional nucleic acid capable of at least partially hybridizing to the first region of the guide nucleic acid. In some embodiments, the tracrRNA or additional nucleic acid is capable of at least partially hybridizing to the 5′ end of the second region of the guide nucleic acid.

[0246] In some embodiments, a repeat hybridization sequence is at the 3′ end of a tracrRNA. In some embodiments, a repeat hybridization sequence may have a length of about 1, about 2, about 3, about 4, about 5, about 6, about 7, about 8, about 9, about 10, about 12, about 14, about 16, about 18, or about 20 linked nucleotides. In some embodiments, the length of the repeat hybridization sequence is 1 to 20 linked nucleotides.

[0247] A tracrRNA and/or tracrRNA-crRNA duplex may form a secondary structure that facilitates the binding of an effector protein to a tracrRNA or a tracrRNA-crRNA. In some embodiments, the secondary structure modifies activity of the effector protein on a target nucleic acid. In some embodiments, the secondary structure comprises a stem-loop structure comprising a stem region and a loop region. In some embodiments, the stem region is 4 to 8 linked nucleotides in length. In some embodiments, the stem region is 5 to 6 linked nucleotides in length. In some embodiments, the stem region is 4 to 5 linked nucleotides in length. In some embodiments, the secondary structure comprises a pseudoknot (e.g., a secondary structure comprising a stem at least partially hybridized to a second stem or half-stem secondary structure). An effector protein may recognize a secondary structure comprising multiple stem regions. In some embodiments, nucleotide sequences of the multiple stem regions are identical to one another. In some embodiments, the nucleotide sequences of at least one of the multiple stem regions is not identical to those of the others. In some embodiments, the secondary structure comprises at least two, at least three, at least four, or at least five stem regions. In some embodiments, the secondary structure comprises one or more loops. In some embodiments, the secondary structure comprises at least one, at least two, at least three, at least four, or at least five loops.

### F. Engineered Modifications

[0248] Polypeptides (e.g., effector proteins) and nucleic acids (e.g., engineered guide nucleic acids) can be further modified as described herein. Examples are modifications that do not alter the primary sequence of the polypeptides or nucleic acids, such as chemical derivatization of polypeptides (e.g., acylation, acetylation, carboxylation, amidation, etc.), or modifications that do alter the primary sequence of the polypeptide or nucleic acid. Also included are polypeptides that have a modified glycosylation pattern (e.g., those made by: modifying the glycosylation patterns of a polypeptide during its synthesis and processing or in further processing steps; by exposing the polypeptide to enzymes which affect glycosylation, such as mammalian glycosylating or deglycosylating enzymes). Also embraced are polypeptides that have phosphorylated amino acid residues (e.g., phosphotyrosine, phosphoserine, or phosphothreonine).

[0249] Modifications disclosed herein can also include modification of described polypeptides and/or guide nucleic acids through any suitable method, such as molecular biological techniques and/or synthetic chemistry, to improve their resistance to proteolytic degradation, to change the target sequence specificity, to optimize solubility properties, to alter protein activity (e.g., transcription modulatory activity, enzymatic activity, etc.) or to render them more suitable for their intended purpose (e.g., in vivo administration, in vitro methods, or ex vivo applications). Analogs of such polypeptides include those containing residues other than naturally occurring L-amino acids, e.g. D-amino acids or non-naturally occurring synthetic amino acids. D-amino acids may be substituted for some or all of the amino acid residues. Modifications can also include modifications with non-naturally occurring unnatural amino acids. The particular sequence and the manner of preparation will be determined by convenience, economics, purity required, and the like.

[0250] Modifications can further include the introduction of various groups to polypeptides and/or guide nucleic acids described herein. For example, groups can be introduced during synthesis or during expression of a polypeptide (e.g., an effector protein), which allow for linking to other molecules or to a surface. Thus, e.g., cysteines may be used to make thioethers, histidines for linking to a metal ion complex, carboxyl groups for forming amides or esters, amino groups for forming amides, and the like.

[0251] Modifications can further include changing of nucleic acids described herein (e.g., engineered guide nucleic acids) to provide the nucleic acid with a new or enhanced feature, such as improved stability. Such modifications of a nucleic acid include a nucleobase base modification, abackbone modification, a sugar modification, or combinations thereof. In some embodiments, the modifications can be of one or more nucleotides, nucleosides, or nucleobases in a nucleic acid. In some embodiments, uridines can be exchanged for pseudouridines (e.g., 1N-Methyl-Pseudouridine). In some embodiments, all uridines can be exchanged for 1N-Methyl-Pseudouridine. In this application, U can represent uracil or 1N-Methyl-Pseudouridine.

[0252] In some embodiments, nucleic acids (e.g., nucleic acids encoding effector proteins, engineered guide nucleic acids, or nucleic acids encoding engineered guide nucleic acids) described herein comprise one or more modifications comprising: 2′O-methyl modified nucleotides (e.g., 2′-O-Methyl (2′OMe) sugar modifications); 2′ fluoro modified nucleotides (e.g., 2′-fluoro (2′-F) sugar modifications); locked nucleic acid (LNA) modified nucleotides; peptide nucleic acid (PNA) modified nucleotides; nucleotides with phosphorothioate linkages; a 5′ cap (e.g., a 7-methylguanylate cap (m7G)), phosphorothioates, chiral phosphorothioates, phosphorodithioates, phosphotriesters, aminoalkylphosphotriesters, methyl and other alkyl phosphonates including 3′-alkylene phosphonates, 5′-alkylene phosphonates and chiral phosphonates, phosphinates, phosphoramidates including 3′-amino phosphoramidate and aminoalkyl phosphoramidates, phosphorodiamidates, thionophosphor amidates, thionoalkylphosphonates, thionoalkylphosphotriesters, selenophosphates and boranophosphates having normal 3′-5′ linkages, 2′-5′ linked analogs of these, and those having inverted polarity wherein one or more internucleotide linkages is a 3′ to 3′, 5′ to 5′ or 2′ to 2′ linkage; phosphorothioate and/or heteroatom internucleoside linkages, such as —CH2-NH—O—CH2-, —CH2-N(CH3)-O—CH2- (known as a methylene (methylimino) or MMI backbone), —CH2-O—N(CH3)-CH2-, —CH2-N(CH3)-N(CH3)-CH2- and —O—N(CH3)-CH2-CH2- (wherein the native phosphodiester internucleotide linkage is represented as —O—P(═O)(OH)—O—CH2-); morpholino linkages (formed in part from the sugar portion of a nucleoside); morpholino backbones; phosphorodiamidate or other non-phosphodiester internucleoside linkages; siloxane backbones; sulfide, sulfoxide and sulfone backbones; formacetyl and thioformacetyl backbones; methylene formacetyl and thioformacetyl backbones; riboacetyl backbones; alkene containing backbones; sulfamate backbones; methyleneimino and methylenehydrazino backbones; sulfonate and sulfonamide backbones; amide backbones; other backbone modifications having mixed N, O, S and CH2 component parts; and combinations thereof.

### G. Expression Vectors

[0253] Compositions, systems, and methods described herein comprise a vector or a use thereof. A vector can comprise a nucleic acid of interest. In some embodiments, the nucleic acid of interest comprises one or more components of a composition or system described herein. In some embodiments, the nucleic acid of interest comprises a nucleotide sequence that encodes one or more components of the composition or system described herein. In some embodiments, one or more components comprises an effector protein, an effector partner, and a guide nucleic acid. In some embodiments, the component comprises a nucleic acid encoding an effector protein, nucleic acid encoding an effector partner, and a guide nucleic acid. In some embodiments, a vector may be part of a vector system. In some embodiments, components described herein (e.g., effector protein, effector partner, guide nucleic acid) are encoded by the same vector. In some embodiments, components described herein (e.g., effector protein, effector partner, guide nucleic acid) are encoded by different vectors. In some embodiments, the components are operably linked to a promoter that is operable in a target cell, such as a eukaryotic cell.

[0254] In some embodiments, a vector may comprise or encode one or more regulatory elements. Regulatory elements may refer to transcriptional and translational control sequences, such as promoters, enhancers, polyadenylation signals, terminators, protein degradation signals, and the like, that provide for and/or regulate transcription of a non-coding sequence or a coding sequence and/or regulate translation of an encoded polypeptide. In some embodiments, a vector may comprise or encode for one or more additional elements, such as, for example, replication origins, antibiotic resistance (or a nucleic acid encoding the same), a tag (or a nucleic acid encoding the same), selectable markers, and the like. In some embodiments, a vector comprises or encodes for one or more elements, such as, for example, ribosome binding sites, and RNA splice sites.

[0255] Vectors described herein can encode a promoter—a regulatory region on a nucleic acid, such as a DNA sequence, capable of initiating transcription of a downstream (3′ direction) coding or non-coding sequence. A promoter can be linked at its 3′ terminus to a nucleic acid, the expression or transcription of which is desired, and extends upstream (5′ direction) to include bases or elements necessary to initiate transcription or induce expression, which could be measured at a detectable level. A promoter can comprise a nucleotide sequence, referred to herein as a “promoter sequence”. The promoter sequence can include a transcription initiation site, and one or more protein binding domains responsible for the binding of transcription machinery, such as RNA polymerase. When eukaryotic promoters are used, such promoters can contain “TATA” boxes and “CAT” boxes. Various promoters, including inducible promoters, may be used to drive expression, i.e., transcriptional activation, of the nucleic acid of interest. Accordingly, in some embodiments, the nucleic acid of interest can be operably linked to a promoter.

[0256] Promotors may be any suitable type of promoter envisioned for the compositions, systems, and methods described herein. Examples include constitutively active promoters (e.g., CMV promoter), inducible promoters (e.g., heat shock promoter, tetracycline-regulated promoter, steroid-regulated promoter, metal-regulated promoter, estrogen receptor-regulated promoter, etc.), spatially restricted and/or temporally restricted promoters (e.g., a tissue specific promoter, a cell type specific promoter, etc.), etc. Suitable promoters include, but are not limited to: SV40 early promoter, mouse mammary tumor virus long terminal repeat (LTR) promoter; adenovirus major late promoter (Ad MLP); a herpes simplex virus (HSV) promoter, a cytomegalovirus (CMV) promoter such as the CMV immediate early promoter region (CMVIE), a rous sarcoma virus (RSV) promoter, a human U6 small nuclear promoter (U6), an enhanced U6 promoter, and a human Hl promoter (Hl). By transcriptional activation, it is intended that transcription will be increased above basal levels in the target cell by 2 fold, 5 fold, 10 fold, 50 fold, by 100 fold, 500 fold, or by 1000 fold, or more. In addition, vectors used for providing a nucleic acid that, when transcribed, produces a guide nucleic acid and/or a nucleic acid that encodes an effector protein to a cell may include nucleic acid sequences that encode for selectable markers in the target cells, so as to identify cells that have taken up the guide nucleic acid and/or the effector protein.

[0257] In general, vectors provided herein comprise at least one promotor or a combination of promoters driving expression or transcription of an effector protein, effector partner, guide nucleic acid, or combination thereof. In some embodiments, the vector comprises a nucleotide sequence of a promoter. In some embodiments, the vector comprises two promoters. In some embodiments, the vector comprises three promoters. In some embodiments, a length of the promoter is less than about 500, less than about 400, less than about 300, or less than about 200 linked nucleotides. In some embodiments, a length of the promoter is at least 100, at least 200, at least 300, at least 400, or at least 500 linked nucleotides. Non-limiting examples of promoters include CMV, 7SK, EFla, RPBSA, hPGK, EFS, SV40, PGK1, Ubc, human beta actin, TRE, UAS, Ac5, Polyhedrin, CaMKIIa, GALl-10, H1, TEF1, GDS, ADH1, CaMV35S, HSV TK, Ubi, U6, MNDU3, MSCV, MND, and CAG. In some embodiments, some promoters (e.g., U6, enhanced U6, Hl and 7SK) prefers the nucleic acid being transcribed having “g” nucleotide at the 5′ end of the coding sequence. Accordingly, when such coding sequence is expressed, it comprises an additional “g” nucleotide at 5′ end. In some embodiments, vectors provided herein comprise a promotor driving expression or transcription of any one of the guide nucleic acids described herein (e.g., TABLEs 7-10) further comprises “g” nucleotide at 5′ end of the guide nucleic acid, wherein the promotor is selected from U6, enhanced U6, Hl and 7SK.

[0258] In some embodiments, the promoter is a constitutive promoter. In some embodiments, the promoter is an inducible promoter. In some embodiments, the inducible promoter only drives expression of its corresponding coding sequence (e.g., polypeptide or guide nucleic acid) when a signal is present, e.g., a hormone, a small molecule, a peptide. Non-limiting examples of inducible promoters are the T7 RNA polymerase promoter, the T3 RNA polymerase promoter, the Isopropyl-beta-D-thiogalactopyranoside (IPTG)-regulated promoter, a lactose induced promoter, a heat shock promoter, a tetracycline-regulated promoter (tetracycline-inducible or tetracycline-repressible), a steroid regulated promoter, a metal-regulated promoter, and an estrogen receptor-regulated promoter. In some embodiments, the promoter is an activation-inducible promoter, such as a CD69 promoter. In some embodiments, the promoter for expressing effector protein is a ubiquitous promoter. In some embodiments, the ubiquitous promoter comprises MND or CAG promoter sequence.

[0259] In some embodiments, the promoters are prokaryotic promoters (e.g., drive expression of a gene in a prokaryotic cell). In some embodiments, the promoters are eukaryotic promoters, (e.g., drive expression of a gene in a eukaryotic cell). In some embodiments, the promoter is EF1a. In some embodiments, the promoter is ubiquitin. In some embodiments, vectors are bicistronic or polycistronic vector (e.g., having or involving two or more loci responsible for generating a protein) having an internal ribosome entry site (IRES) is for translation initiation in a cap-independent manner.

[0260] In some embodiments, a vector described herein is a nucleic acid expression vector. In some embodiments, a vector described herein is a recombinant expression vector. In some embodiments, a vector described herein is a messenger RNA. In some embodiments, a vector comprising the recombinant nucleic acid as described herein, wherein the vector is a viral vector, an adeno associated viral (AAV) vector, a retroviral vector, or a lentiviral vector. In some embodiments, a vector described herein or a recombinant nucleic acid described herein is comprised in a cell. In some embodiments, a recombinant nucleic acid integrated into a genomic DNA sequence of the cell, wherein the cell is a eukaryotic cell or a prokaryotic cell.

[0261] In some embodiments, a vector described herein is a delivery vector. In some embodiments, the delivery vector is a eukaryotic vector, a prokaryotic vector (e.g., a bacterial vector) a viral vector, or any combination thereof. In some embodiments, the delivery vehicle is a non-viral vector. In some embodiments, the delivery vector is a plasmid. In some embodiments, the plasmid comprises DNA. In some embodiments, the plasmid comprises RNA. In some embodiments, the plasmid comprises circular double-stranded DNA. In some embodiments, the plasmid is linear. In some embodiments, the plasmid comprises one or more coding sequences of interest and one or more regulatory elements. In some embodiments, the plasmid comprises a bacterial backbone containing an origin of replication and an antibiotic resistance gene or other selectable marker for plasmid amplification in bacteria. In some embodiments, the plasmid is a minicircle plasmid. In some embodiments, the plasmid contains one or more genes that provide a selective marker to induce a target cell to retain the plasmid. In some examples, the plasmids are engineered through synthetic or other suitable means known in the art. For example, in some embodiments, the genetic elements are assembled by restriction digest of the desired genetic sequence from a donor plasmid or organism to produce ends of the DNA which is then be readily ligated to another genetic sequence.

[0262] In some embodiments, vectors comprise an enhancer. Enhancers are nucleotide sequences that have the effect of enhancing promoter activity. In some embodiments, enhancers augment transcription regardless of the orientation of their sequence. In some embodiments, enhancers activate transcription from a distance of several kilo base pairs. Furthermore, enhancers are located optionally upstream or downstream of a gene region to be transcribed, and/or located within the gene, to activate the transcription. Exemplary enhancers include, but are not limited to, WPRE; CMV enhancers; the R—U5′ segment in LTR of HTLV-I.

### Administration of a Non-Viral Vector

[0263] In some embodiments, an administration of a non-viral vector comprises contacting a cell, such as a host cell, with the non-viral vector. In some embodiments, a physical method or a chemical method is employed for delivering the vector into the cell. Exemplary physical methods include electroporation, gene gun, sonoporation, magnetofection, or hydrodynamic delivery. Exemplary chemical methods include delivery of the recombinant polynucleotide by liposomes such as, cationic lipids or neutral lipids; lipofection; dendrimers; lipid nanoparticle (LNP); or cell-penetrating peptides.

### Lipid Particles and Non-Viral Vectors

[0264] In some embodiments, compositions and systems provided herein comprise a lipid particle. In some embodiments, a lipid particle is a lipid nanoparticle (LNP). In some embodiments, a lipid or a lipid nanoparticle can encapsulate an expression vector as described herein. LNPs are a non-viral delivery system for delivery of the composition and/or system components described herein. LNPs are particularly effective for delivery of nucleic acids. Beneficial properties of LNP include ease of manufacture, low cytotoxicity and immunogenicity, high efficiency of nucleic acid encapsulation and cell transfection, multi-dosing capabilities and flexibility of design (Kulkarni et al., (2018) Nucleic Acid Therapeutics, 28(3):146-157). In some embodiments, compositions and methods comprise a lipid, polymer, nanoparticle, or a combination thereof, or use thereof, to introduce one or more effector proteins, one or more guide nucleic acids, one or more effector partners, or any combinations thereof to a cell. Non-limiting examples of lipids and polymers are cationic polymers, cationic lipids, ionizable lipids, or bio-responsive polymers. In some embodiments, the ionizable lipids exploits chemical-physical properties of the endosomal environment (e.g., pH) offering improved delivery of nucleic acids. In some embodiments, the ionizable lipids are neutral at physiological pH. In some embodiments, the ionizable lipids are protonated under acidic pH. In some embodiments, the bio-responsive polymer exploits chemical-physical properties of the endosomal environment (e.g., pH) to preferentially release the genetic material in the intracellular space.

[0265] In some embodiments, a LNP comprises an outer shell and an inner core. In some embodiments, the outer shell comprises lipids. In some embodiments, the lipids comprise modified lipids. In some embodiments, the modified lipids comprise pegylated lipids. In some embodiments, the lipids comprise one or more of cationic lipids, anionic lipids, ionizable lipids, and non-ionic lipids. In some embodiments, the LNP comprises one or more of N1,N3,N5-tris(3-(didodecylamino)propyl)benzene-1,3,5-tricarboxamide (TT3), 2-dioleoyl-sn-glycero-3-phosphoethanolamine (DOPE), 1-palmitoyl-2-oleoylsn-glycero-3-phosphoethanolamine (POPE), 1,2-distearoyl-sn-glycero-3-phosphocholine (DSPC), cholesterol (Chol), 1,2-dimyristoyl-sn-glycerol, and methoxypolyethylene glycol (DMG-PEChooo), derivatives, analogs, or variants thereof. In some embodiments, the LNP has a negative net overall charge prior to complexation with one or more of a guide nucleic acid, effector protein, effector partner, and nucleic acid encoding the same. In some embodiments, the inner core is a hydrophobic core. In some embodiments, the guide nucleic acid, effector protein, effector partner, or nucleic acid encoding the same forms a complex with one or more of the cationic lipids and the ionizable lipids. In some embodiments, the nucleic acid encoding the effector protein or the nucleic acid encoding the guide nucleic acid is self-replicating.

[0266] In some embodiments, a LNP comprises one or more of cationic lipids, ionizable lipids, and modified versions thereof. In some embodiments, the ionizable lipid comprises TT3 or a derivative thereof. Accordingly, in some embodiments, the LNP comprises one or more of TT3 and pegylated TT3. The publication WO2016187531 is hereby incorporated by reference in its entirety, which describes representative LNP formulations in Table 2 and Table 3, and representative methods of delivering LNP formulations in Example 7.

[0267] In some embodiments, a LNP comprises a lipid composition targeting to a specific organ. In some embodiments, the lipid composition comprises lipids having a specific alkyl chain length that controls accumulation of the LNP in the specific organ (e.g., liver or spleen). In some embodiments, the lipid composition comprises a biomimetic lipid that controls accumulation of the LNP in the specific organ (e.g., brain). In some embodiments, the lipid composition comprises lipid derivatives (e.g., cholesterol derivatives) that controls accumulation of the LNP in a specific cell (e.g., liver endothelial cells, Kupffer cells, hepatocytes).

### Delivery of Viral Vectors

[0268] In some embodiments, a vector described herein comprises a viral vector. In some embodiments, the viral vector comprises a nucleic acid to be delivered into a host cell by a recombinantly produced virus or viral particle. The nucleic acid may be single-stranded or double stranded, linear or circular, segmented or non-segmented. The nucleic acid may comprise DNA, RNA, or a combination thereof. In some embodiments, the vector is an adeno-associated viral vector. There are a variety of viral vectors that are associated with various types of viruses, including but not limited to retroviruses (e.g., lentiviruses and γ-retroviruses), adenoviruses, arenaviruses, alphaviruses, adeno-associated viruses (AAVs), baculoviruses, vaccinia viruses, herpes simplex viruses and poxviruses. In some embodiments, the vector is an adeno-associated viral (AAV) vector. In some embodiments, the viral vector is a recombinant viral vector. In some embodiments, the vector is a retroviral vector. In some embodiments, the retroviral vector is a lentiviral vector. In some embodiments, the retroviral vector comprises gamma-retroviral vector. A viral vector provided herein may be derived from or based on any such virus. For example, in some embodiments, the gamma-retroviral vector is derived from a Moloney Murine Leukemia Virus (MoMLV, MMLV, MuLV, or MLV) or a Murine Stem cell Virus (MSCV) genome. In some embodiments, the lentiviral vector is derived from the human immunodeficiency virus (HIV) genome. In some embodiments, the viral vector is a chimeric viral vector. In some embodiments, the chimeric viral vector comprises viral portions from two or more viruses. In some embodiments, the viral vector corresponds to a virus of a specific serotype.

[0269] In some embodiments, a viral vector is an adeno-associated viral vector (AAV vector). In some embodiments, a viral particle that delivers a viral vector described herein is an AAV. In some embodiments, the AAV comprises any AAV known in the art. In some embodiments, the viral vector corresponds to a virus of a specific AAV serotype. In some embodiments, the AAV serotype is selected from an AAV1 serotype, an AAV2 serotype, AAV3 serotype, an AAV4 serotype, AAV5 serotype, an AAV6 serotype, AAV7 serotype, an AAV8 serotype, an AAV9 serotype, an AAV10 serotype, an AAV11 serotype, an AAV12 serotype, an AAV-rh10 serotype, and any combination, derivative, or variant thereof. In some embodiments, the AAV vector is a recombinant vector, a hybrid AAV vector, a chimeric AAV vector, a self-complementary AAV (scAAV) vector, a single-stranded AAV, or any combination thereof. scAAV genomes are generally known in the art and contain both DNA strands which can anneal together to form double-stranded DNA.

[0270] In some embodiments, an AAV vector described herein is a chimeric AAV vector. In some embodiments, the chimeric AAV vector comprises an exogenous amino acid or an amino acid substitution, or capsid proteins from two or more serotypes. In some examples, a chimeric AAV vector may be genetically engineered to increase transduction efficiency, selectivity, or a combination thereof.

[0271] In some embodiments, AAV vector described herein comprises two inverted terminal repeats (ITRs). According, in some embodiments, the viral vector provided herein comprises two inverted terminal repeats of AAV. A nucleotide sequence between the ITRs of an AAV vector (also referred to as a transgene) provided herein comprises a sequence an effector protein, effector partner, guide nucleic acid, a nucleic acid encoding the same, or combination thereof. In some embodiments, the transgene comprises a nucleic acid encoding one or more effector proteins (and/or effector partners), a nucleic acid encoding one or more fusion proteins (e.g., a nuclear localization signal (NLS), polyA tail), one or more guide nucleic acids, a nucleic acid encoding the one or more guide nucleic acids, respective promoter(s), or any combinations thereof. In some embodiments, viral vectors provided herein comprise at least one promotor or a combination of promoters driving expression or transcription of an effector protein, effector partner, guide nucleic acid, a nucleic acid encoding the same, or combination thereof. In some embodiments, a coding region of the AAV vector forms an intramolecular double-stranded DNA template thereby generating the AAV vector that is a self-complementary AAV (scAAV) vector. In some embodiments, the scAAV vector comprises the sequence (encoding an effector protein, effector partner, guide nucleic acid, a nucleic acid encoding the same, or combination thereof) that has a length of about 2 kb to about 3 kb. In some embodiments, the AAV vector provided herein is a self-inactivating AAV vector. In some embodiments, the AAV vector provided herein comprises a modification, such as an insertion, deletion, chemical alteration, or synthetic modification, relative to a wild-type AAV vector.

### Producing AAV Delivery Vectors

[0272] In some embodiments, methods of producing AAV delivery vectors herein comprise packaging a nucleic acid encoding an effector protein and a guide nucleic acid, or a combination thereof, into an AAV vector. In some embodiments, methods of producing the delivery vector comprises, (a) contacting a cell with at least one nucleic acid encoding: (i) a guide nucleic acid; (ii) a Replication (Rep) gene; and (iii) a Capsid (Cap) gene that encodes an AAV capsid protein; (b) expressing the AAV capsid protein in the cell; (c) assembling an AAV particle; and (d) packaging an effector encoding nucleic acid into the AAV particle, thereby generating an AAV delivery vector. In some embodiments, promoters, stuffer sequences, and any combination thereof may be packaged in the AAV vector. In some examples, the AAV vector may package 1, 2, 3, 4, or 5 guide nucleic acids or copies thereof. In some embodiments, the AAV vector comprises inverted terminal repeats, e.g., a 5′ inverted terminal repeat and a 3′ inverted terminal repeat. In some embodiments, the AAV vector comprises a mutated inverted terminal repeat that lacks a terminal resolution site.

[0273] In some embodiments, a hybrid AAV vector is produced by transcapsidation, e.g., packaging an inverted terminal repeat (ITR) from a first serotype into a capsid of a second serotype, wherein the first and second serotypes may be not the same. In some examples, the Rep gene and ITR from a first AAV serotype (e.g., AAV2) may be used in a capsid from a second AAV serotype (e.g., AAV9), wherein the first and second AAV serotypes may be not the same. As a non-limiting example, a hybrid AAV serotype comprising the AAV2 ITRs and AAV9 capsid protein may be indicated AAV2/9. In some examples, the hybrid AAV delivery vector comprises an AAV2/1, AAV2/2, AAV 2/4, AAV2/5, AAV2/8, or AAV2/9 vector.

### Producing AAV Particles

[0274] In some embodiments, AAV particles described herein are recombinant AAV (rAAV). In some embodiments, rAAV particles are generated by transfecting AAV producing cells with an AAV-containing plasmid carrying the sequence encoding an effector protein, effector partner, guide nucleic acid, a nucleic acid encoding the same, or combination thereof, a plasmid that carries viral encoding regions, i.e., Rep and Cap gene regions; and a plasmid that provides the helper genes such as ElA, E1B, E2A, E40RF6 and VA. In some embodiments, the AAV producing cells are mammalian cells. In some embodiments, host cells for rAAV viral particle production are mammalian cells. In some embodiments, a mammalian cell for rAAV viral particle production is a COS cell, a HEK293T cell, a HeLa cell, a KB cell, a variant thereof, or a combination thereof. In some embodiments, rAAV virus particles can be produced in the mammalian cell culture system by providing the rAAV plasmid to the mammalian cell. In some embodiments, producing rAAV virus particles in a mammalian cell comprises transfecting vectors that express the rep protein, the capsid protein, and the gene-of-interest expression construct flanked by the ITR sequence on the 5′ and 3′ ends. Methods of such processes are provided in, for example, Naso et al., BioDrugs, 2017 August; 31(4):317-334 and Benskey et al., (2019), Methods Mol Biol., 1937:3-26, each of which is incorporated by reference in their entireties.

[0275] In some embodiments, rAAV is produced in a non-mammalian cell. In some embodiments, rAAV is produced in an insect cell. In some embodiments, the insect cell for producing rAAV viral particles comprises a Sf9 cell. In some embodiments, production of rAAV virus particles in insect cells may comprise baculovirus. In some embodiments, production of rAAV virus particles in insect cells may comprise infecting the insect cells with three recombinant baculoviruses, one carrying the cap gene, one carrying the rep gene, and one carrying the gene-of-interest expression construct enclosed by an ITR on both the 5′ and 3′ end. In some embodiments, rAAV virus particles are produced by the One Bac system. In some embodiments, rAAV virus particles can be produced by the Two Bac system. In some embodiments, in the Two Bac system, the rep gene and the cap gene of the AAV is integrated into one baculovirus virus genome, and the ITR sequence and the gene-of-interest expression construct is integrated into another baculovirus virus genome. In some embodiments, in the One Bac system, an insect cell line that expresses both the rep protein and the capsid protein is established and infected with a baculovirus virus integrated with the ITR sequence and the gene-of-interest expression construct. Details of such processes are provided in, for example, Smith et. al., (1983), Mol. Cell. Biol., 3(12):2156-65; Urabe et al., (2002), Hum. Gene. Ther., 1;13(16):1935-43; and Benskey et al., (2019), Methods Mol Biol., 1937:3-26, each of which is incorporated by reference in its entirety.

### H. Target Nucleic Acids

[0276] Disclosed herein are compositions, systems and methods for modifying expression of a target nucleic acid. In some embodiments, the target nucleic acid is a double stranded nucleic acid. In some embodiments, the target nucleic acid is a single stranded nucleic acid. Alternatively, or in combination, the target nucleic acid is a double stranded nucleic acid and is prepared into single stranded nucleic acids before or upon contacting an RNP. In some embodiments, the single stranded nucleic acid comprises a RNA, wherein the RNA comprises a mRNA, a rRNA, a tRNA, a non-coding RNA, a long non-coding RNA, a microRNA (miRNA), and a single-stranded RNA (ssRNA). In some embodiments, the target nucleic acid is complementary DNA (cDNA) synthesized from a single-stranded RNA template in a reaction catalyzed by a reverse transcriptase. In some embodiments, the target nucleic acid comprises an RNA, a DNA, or combination thereof. In some embodiments, guide nucleic acids described herein hybridize to a portion of the target nucleic acid. In some embodiments, the target nucleic acid is from a virus, a parasite, or a bacterium described herein. In some embodiments, the target sequence is only found in a eukaryote in nature. In some embodiments, the target sequence is only found in a human in nature.

[0277] In some embodiments, a target nucleic acid comprising a target sequence comprises a PAM sequence. In some embodiments, the PAM sequence is adjacent to the target sequence. In some embodiments, the PAM sequence is 3′ to the target sequence. In some embodiments, the PAM sequence is directly 3′ to the target sequence. In some embodiments, the PAM sequence 5′ to the target sequence. In some embodiments, the PAM sequence is directly 5′ to the target sequence. In some embodiments, the target nucleic acid as described in the methods herein does not initially comprise a PAM sequence. However, any target nucleic acid of interest may be generated using the methods described herein to comprise a PAM sequence, and thus be a PAM target nucleic acid. A PAM target nucleic acid, as used herein, refers to a target nucleic acid that has been amplified to insert a PAM sequence that is recognized by an effector protein system.

[0278] In some embodiments, a target nucleic acid comprises 5 to 100, 5 to 90, 5 to 80, 5 to 70, 5 to 60, 5 to 50, 5 to 40, 5 to 30, 5 to 25, 5 to 20, 5 to 15, or 5 to 10 linked nucleotides. In some embodiments, the target nucleic acid comprises 10 to 90, 20 to 80, 30 to 70, or 40 to 60 linked nucleotides. In some embodiments, the target nucleic acid comprises 5, 6, 7, 8, 9, 10, 11, 12, 13, 14, 15, 16, 17, 18, 19, 20, 21, 22, 23, 24, 25, 26, 27, 28, 29, 30, 31, 32, 33, 34, 35, 36, 37, 38, 39, 40, 45, 50, 60, 70, 80, 90, or 100 linked nucleotides. In some embodiments, the target nucleic acid comprises at least 10, at least 20, at least 30, at least 40, at least 50, at least 60, at least 70, at least 80, at least 90, or at least 100 linked nucleotides. In some embodiments, the target sequence in the target nucleic acid comprises at least 10 contiguous nucleotides that are complementary to the guide nucleic acid or engineered guide nucleic acid.

[0279] In some embodiments, compositions, systems, and methods described herein comprise a target nucleic acid may be responsible for a disease, contain a mutation (e.g., single strand polymorphism, point mutation, insertion, or deletion), be contained in an amplicon, or be uniquely identifiable from the surrounding nucleic acids (e.g., contain a unique sequence of nucleotides). In some embodiments, the target nucleic acid has undergone a modification after contacting with an RNP. In some embodiments, the modification is a change in the sequence of the target nucleic acid. In some embodiments, the modification comprises an epigenetic modification.

[0280] In some embodiments, the target nucleic acid comprises a nucleic acid sequence from a pathogen responsible for a disease. Non-limiting examples of pathogens are bacteria, a virus and a fungus. In some embodiments, the target nucleic acid comprises a nucleic acid sequence of a virus, a bacterium, or other pathogen responsible for a disease in a plant (e.g., a crop).

[0281] In some embodiments, a target nucleic acid comprises a portion or a specific region of a nucleic acid from a genomic locus, any DNA amplicon of, a reverse transcribed mRNA, or a cDNA from a gene described herein. In some embodiments, the target nucleic acid is an amplicon of at least a portion of a gene. Non-limiting examples of genes are recited in TABLE 11. Nucleic acid sequences of target nucleic acids and/or corresponding genes are readily available in public databases as known and used in the art. In some embodiments, the target nucleic acid is selected from TABLE 11. In some embodiments, the target nucleic acid comprises one or more target sequences. In some embodiments, the one or more target sequence is within any one of the target nucleic acids set forth in TABLE 11. In some embodiments, the one or more target sequence is from about 500 nucleotides upstream to about 500 nucleotides downstream of the transcriptional start site of the target nucleic acids set forth in TABLE 11.

[0282] In some embodiments, a target sequence is from a region from about 500 nucleotides upstream to about 500 nucleotides downstream of the transcriptional start site of the apolipoprotein C3 (APOC3) gene. In general, guide nucleic acids described herein comprise a sequence that is complementary to and/or hybridizes to the target sequence of the APOC3 gene.

[0283] In some embodiments, a target sequence is from a region from about 500 nucleotides upstream to about 500 nucleotides downstream of the transcriptional start site of the Proprotein convertase subtilisin/kexin type 9 (PCSK9) gene. In general, guide nucleic acids described herein comprise a sequence that is complementary to and/or hybridizes to a target sequence of the PCSK9 gene.

[0284] In some embodiments, a target sequence is from a region from about 500 nucleotides upstream to about 500 nucleotides downstream of the transcriptional start site of the Angiopoietin-like 3 (ANGPTL3) gene. In general, guide nucleic acids described herein comprise a sequence that is complementary to and/or hybridizes to a target sequence of the ANGPTL3 gene.

### Mutations

[0285] In some embodiments, target nucleic acids described herein comprise a mutation. In some embodiments, a composition, system or method described herein can be used to modify the expression of a target nucleic acid comprising a mutation. In some embodiments, a composition, system or method described herein can be used to reduce, prevent or abolish the expression of a target nucleic acid comprising a mutation. A mutation may result in the insertion of at least one amino acid in a protein encoded by the target nucleic acid. A mutation may result in the deletion of at least one amino acid in a protein encoded by the target nucleic acid. A mutation may result in the substitution of at least one amino acid in a protein encoded by the target nucleic acid. A mutation that results in the deletion, insertion, or substitution of one or more amino acids of a protein encoded by the target nucleic acid may result in misfolding of a protein encoded by the target nucleic acid. A mutation may result in a premature stop codon, thereby resulting in a truncation of the encoded protein.

[0286] Non-limiting examples of mutations are insertion-deletion (indel), a point mutation, single nucleotide polymorphism (SNP), a chromosomal mutation, a copy number mutation or variation, and frameshift mutations. In some embodiments, an indel mutation is an insertion or deletion of one or more nucleotides. In some embodiments, a point mutation comprises a substitution, insertion, or deletion. In some embodiments, a frameshift mutation occurs when the number of nucleotides in the insertion/deletion is not divisible by three, and it occurs in a protein coding region. In some embodiments, a chromosomal mutation can comprise an inversion, a deletion, a duplication, or a translocation of one or more nucleotides. In some embodiments, a copy number variation can comprise a gene amplification or an expanding trinucleotide repeat. In some embodiments, an SNP is associated with a phenotype of the sample or a phenotype of the organism from which the sample was taken. In some embodiments, an SNP is associated with altered phenotype from wild type phenotype. In some embodiments, the SNP is a synonymous substitution or a nonsynonymous substitution. In some embodiments, the nonsynonymous substitution is a missense substitution or a nonsense point mutation. In some embodiments, the synonymous substitution is a silent substitution.

[0287] In some embodiments, a target nucleic acid described herein comprises a mutation of one or more nucleotides. In some embodiments, the one or more nucleotides comprises 1, 2, 3, 4, 5, 6, 7, 8, 9, 10, 11, 12, 13, 14, 15, 16, 17, 18, 19, 20 or more nucleotides. In some embodiments, the mutation comprises a deletion, insertion, and/or substitution of about 5, about 10, about 15, about 20, about 25, about 30, about 35, about 40, about 45, about 50, about 55, about 60, about 65, about 70, about 75, about 80, about 85, about 90, about 95, about 100, about 200, about 300, about 400, about 500, about 600, about 700, about 800, about 900, or about 1000 nucleotides. In some embodiments, the mutation comprises a deletion, insertion, and/or substitution of 1 to 5, 5 to 10, 10 to 15, 15 to 20, 20 to 25, 25 to 30, 30 to 35, 35 to 40, 40 to 45, 45 to 50, 50 to 55, 55 to 60, 60 to 65, 65 to 70, 70 to 75, 75 to 80, 80 to 85, 85 to 90, 90 to 95, 95 to 100, 100 to 200, 200 to 300, 300 to 400, 400 to 500, 500 to 600, 600 to 700, 700 to 800, 800 to 900, 900 to 1000, 1 to 50, 1 to 100, 25 to 50, 25 to 100, 50 to 100, 100 to 500, 100 to 1000, or 500 to 1000 nucleotides. The mutation may be located in a non-coding region or a coding region of a gene, wherein the gene is a target nucleic acid. A mutation may be in an open reading frame of a target nucleic acid. In some embodiments, guide nucleic acids described herein hybridize to a portion of the target nucleic acid comprising or adjacent to the mutation.

[0288] In some embodiments, the target nucleic acid comprises one or more mutations. In some embodiments, the target nucleic acid comprises one or more, two or more, three or more, four or more, five or more, six or more, seven or more, eight or more, nine or more, or ten or more mutations as compared to the unmutated target nucleic acid. In some embodiments, the target nucleic acid comprises a sequence comprising one or more, two or more, three or more, four or more, five or more, six or more, seven or more, eight or more, nine or more, or ten or more mutations as compared to the wildtype sequence. In some embodiments, the target nucleic acid comprises a mutation associated with a disease or disorder.

[0289] In some embodiments, target nucleic acids comprise a mutation, wherein the mutation is a SNP. In some embodiments, the single nucleotide mutation or SNP is associated with a phenotype of the sample or a phenotype of the organism from which the sample was taken. In some embodiments, the SNP is associated with altered phenotype from wild type phenotype. In some embodiments, a single nucleotide mutation, SNP, or deletion described herein is associated with a disease, such as a genetic disease. In some embodiments, the SNP is a synonymous substitution or a nonsynonymous substitution. In some embodiments, the nonsynonymous substitution is a missense substitution or a nonsense point mutation. In some embodiments, the synonymous substitution is a silent substitution. In some embodiments, the mutation is a deletion of one or more nucleotides. In some embodiments, the single nucleotide mutation, SNP, or deletion is associated with a disease such as a genetic disorder. In some embodiments, the mutation, such as a single nucleotide mutation, a SNP, or a deletion, may be encoded in the sequence of a target nucleic acid from the germline of an organism or may be encoded in a target nucleic acid from a diseased cell.

[0290] In some embodiments, the mutation is associated with a disease, such as a genetic disorder. In some embodiments, the mutation may be encoded in the sequence of a target nucleic acid from the germline of an organism or may be encoded in a target nucleic acid from a diseased cell. In some embodiments, a target nucleic acid described herein comprises a mutation associated with a disease. In some examples, a mutation associated with a disease refers to a mutation whose presence in a subject indicates that the subject is susceptible to or suffers from, a disease, disorder, condition, or syndrome. In some examples, a mutation associated with a disease refers to a mutation which causes, contributes to the development of, or indicates the existence of the disease, disorder, condition, or syndrome. A mutation associated with a disease may also refer to any mutation which generates transcription or translation products at an abnormal level, or in an abnormal form, in cells affected by a disease relative to a control without the disease. In some examples, a mutation associated with a disease refers to a mutation whose presence in a subject indicates that the subject is susceptible to, or suffers from, a disease, disorder, or pathological state. In some embodiments, a mutation associated with a disease, comprises the co-occurrence of a mutation and the phenotype of a disease. The mutation may occur in a gene, wherein transcription or translation products from the gene occur at a significantly abnormal level or in an abnormal form in a cell or subject harboring the mutation as compared to a non-disease control subject not having the mutation. In some embodiments, a target nucleic acid described herein comprises a mutation associated with a disease, wherein the target nucleic acid is any one of the target nucleic acids set forth in TABLE 11. In some embodiments, a target nucleic acid described herein comprises a mutation associated with a disease, wherein the disease is any one of the diseases set forth in TABLE 12.

### II. Pharmaceutical Compositions

[0291] Described herein are formulations of introducing compositions or components of a system described herein to a host. In some embodiments, compositions described herein are pharmaceutical compositions. In some embodiments, the pharmaceutical compositions comprise compositions described herein or systems described herein. In some embodiments, the pharmaceutical composition comprises a pharmaceutically acceptable salt, one or more of a vehicle, adjuvant, excipient, or carrier, such as a filler, disintegrant, a surfactant, a binder, a lubricant, or combinations thereof. Remington: The Science and Practice of Pharmacy, 23rd edition, 2020, ed. D. B. Troy, Lippincott Williams & Wilkins, Philadelphia; Encyclopedia of Pharmaceutical Technology, eds. J. Swarbrick and J. C. Boylan, 1988-2001, Marcel Dekker, New York; and Encyclopedia of Pharmaceutical Technology, 3rd edition, 2016, eds. J. Swarbrick, CRC Press, Boca Raton, as well as more recent editions of the aforementioned publications, disclose various carriers used in formulating pharmaceutically acceptably compositions and known techniques for the preparation thereof. Non-limiting examples of pharmaceutically acceptable carriers and diluents suitable for the pharmaceutical compositions disclosed herein include buffers (e.g., neutral buffered saline, phosphate buffered saline); carbohydrates (e.g., glucose, mannose, sucrose, dextran, mannitol); polypeptides or amino acids (e.g., glycine); antioxidants; chelating agents (e.g., EDTA, glutathione); adjuvants (e.g., aluminum hydroxide); surfactants (Polysorbate 80, Polysorbate 20, or Pluronic F68); glycerol; sorbitol; mannitol; polyethyleneglycol; and preservatives. In some embodiments, the vector is formulated for delivery through injection by a needle carrying syringe. In some embodiments, the composition is formulated for delivery by electroporation. In some embodiments, the composition is formulated for delivery by chemical method. In some embodiments, the pharmaceutical compositions comprise a virus vector or a non-viral vector.

[0292] Pharmaceutical compositions described herein comprise a salt. In some embodiments, the salt is a sodium salt. In some embodiments, the salt is a potassium salt. In some embodiments, the salt is a magnesium salt. In some embodiments, the salt is NaCl. In some embodiments, the salt is KNO3. In some embodiments, the salt is Mg2+SO42-.

[0293] Pharmaceutical compositions described herein are in the form of a solution (e.g., a liquid). In some embodiments, the solution is formulated for injection, e.g., intravenous or subcutaneous injection. In some embodiments, the pH of the solution is about 7, about 7.1, about 7.2, about 7.3, about 7.4, about 7.5, about 7.6, about 7.7, about 7.8, about 7.9, about 8, about 8.1, about 8.2, about 8.3, about 8.4, about 8.5, about 8.6, about 8.7, about 8.8, about 8.9, or about 9. In some embodiments, the pH is 7 to 7.5, 7.5 to 8, 8 to 8.5, 8.5 to 9, or 7 to 8.5. In some cases, the pH of the solution is less than 7. In some cases, the pH is greater than 7.

### III. Methods of Modifying Nucleic Acid Expression

[0294] Disclosed herein, in some aspects, are methods for modifying the expression of a target nucleic acid in a cell or subject. In some embodiments, methods comprise preventing, reducing, or abolishing expression of a target nucleic acid. Methods may comprise introducing an epigenetic modification (e.g., methylation, demethylation, acetylation, or deacetylation) to a target nucleic acid.

[0295] Methods may comprise contacting a target nucleic acid with one or more components, compositions or systems described herein. In some embodiments, methods comprise contacting a target nucleic acid with at least one of: (a) an effector protein, or a nucleic acid encoding the effector protein; (b) an effector partner or nucleic acid encoding the effector partner; and (c) a guide nucleic acid or a nucleic acid encoding a guide nucleic acid. In some embodiments, the subject is a mammal. In some embodiments, the subject is a human. In some embodiment, a cell includes the progeny of the cell which has been modified by the methods described herein. It is understood that the progeny of a single cell may not necessarily be completely identical in morphology or in genomic or total DNA complement as the original parent, due to natural, accidental, or deliberate mutation.

[0296] Methods of modifying nucleic acid expression may comprise contacting a cell or subject with a composition, system or component thereof, via a method selected from: viral infection, transfection, conjugation, protoplast fusion, lipofection, electroporation, calcium phosphate precipitation, polyethyleneimine (PEI)-mediated transfection, DEAE-dextran mediated transfection, liposome-mediated transfection, particle gun technology, calcium phosphate precipitation, direct micro injection, nanoparticle-mediated nucleic acid delivery (see, e.g., Panyam et al. Adv Drug Deliv Rev. 2012 Sep. 13. pii: S0169-409X(12)00283-9. doi: 10.1016/j.addr.2012.09.023). In some embodiments, the nucleic acid and/or protein(s) are introduced into a disease cell comprised in a pharmaceutical composition comprising the guide nucleic acid, the effector protein, a pharmaceutically acceptable excipient, or combinations thereof. In some embodiments, methods comprise contacting a cell or subject with one or more nucleic acids, such as a nucleic acid encoding an effector protein. Any suitable method may be used to introduce a nucleic acid into a cell. Suitable methods include, for example, viral infection, transfection, lipofection, electroporation, calcium phosphate precipitation, polyethyleneimine (PEI)-mediated transfection, DEAE-dextran mediated transfection, liposome-mediated transfection, particle gun technology, calcium phosphate precipitation, direct microinjection, nanoparticle-mediated nucleic acid delivery, and the like. Further methods are described throughout. Introducing one or more nucleic acids into a cell may occur in any culture media and under any culture conditions that promote the survival of the cells. Introducing one or more nucleic acids into a cell may be carried out in vivo or ex vivo. Introducing one or more nucleic acids into a cell may be carried out in vitro.

[0297] In some embodiments, methods comprise contacting a cell with an RNA encoding an effector protein. In some embodiments, methods comprise administering an RNA encoding an effector protein to a subject. In some embodiments, methods comprise contacting a cell with an RNA encoding an effector partner. In some embodiments, methods comprise administering an RNA encoding an effector partner to a subject. The RNA may be provided by direct chemical synthesis or may be transcribed in vitro from a DNA (e.g., encoding the effector protein). Once synthesized, the RNA may be introduced into a cell by way of any suitable technique for introducing nucleic acids into cells (e.g., microinjection, electroporation, transfection, etc.).

[0298] Methods may comprise contacting a cell or subject with at least one expression vector. Methods for contacting cells with vectors include but are not limited to electroporation, calcium chloride transfection, microinjection, lipofection, micro-injection, contact with the cell or particle that comprises a molecule of interest, or a package of cells or particles that comprise molecules of interest. In some embodiments, the nucleic acid expression vector is a viral vector. Viral vectors include, but are not limited to, retroviruses, adenoviruses, adeno-associated viruses, and herpes simplex viruses. In some embodiments, the viral vector is a replication-defective viral vector, comprising an insertion of a therapeutic gene inserted in genes essential to the lytic cycle, preventing the virus from replicating and exerting cytotoxic effects. In some embodiments, the viral vector is an adeno associated viral (AAV) vector. In some embodiments, the nucleic acid expression vector is a non-viral vector.

### IV. Methods of Treating a Disease or Disorder

[0299] Described herein are methods for treating a disease in a subject by contacting a target nucleic acid with a composition or system described herein, wherein the target nucleic acid is associated with a gene or expression of a gene related to the disease. In some embodiments, methods comprise treating, preventing, or inhibiting a disease or disorder associated with a mutation or aberrant expression of a gene. In some embodiments, methods for treating a disease or disorder comprise methods of modifying expression of a nucleic acid described herein.

[0300] Methods may comprise administration of a composition(s) or component(s) of a system described herein. In some embodiments, the composition(s) or component(s) of the system comprises use of a recombinant nucleic acid (DNA or RNA), administered for the purpose of modifying the expression of a target nucleic acid. In some embodiments, the composition or component of the system comprises use of a vector to introduce a functional gene or transgene. In some embodiments, vectors comprise nonviral vectors, including cationic polymers, cationic lipids, or bio-responsive polymers. In some embodiments, the bio-responsive polymer exploits chemical-physical properties of the endosomal environment (e.g., pH) to preferentially release the genetic material in the intracellular space. In some embodiments, vectors comprise viral vectors, including retroviruses, adenoviruses, adeno-associated viruses, and herpes simplex viruses. In some embodiments, the vector comprises a replication-defective viral vector, comprising an insertion of a therapeutic gene inserted in genes essential to the lytic cycle, preventing the virus from replicating and exerting cytotoxic effects. By way of non-limiting example, the composition(s) may comprise pharmaceutical compositions described herein. Methods of gene therapy that are applicable to the compositions and systems described herein are described in more detail in Ingusci et al., “Gene Therapy Tools for Brain Diseases”, Front. Pharmacol. 10:724 (2019), which is hereby incorporated by reference in its entirety.

[0301] In some embodiments, treating, preventing, or inhibiting disease or disorder in a subject may comprise contacting a target nucleic acid associated with a particular ailment with a composition described herein. In some embodiments, the methods of treating, preventing, or inhibiting a disease or disorder comprise modulating gene expression of a target nucleic acid. In some embodiments, methods comprise increasing gene expression. In some embodiments, methods comprise activating gene expression. In some embodiments, methods comprise reducing gene expression. In some embodiments, methods comprise abolishing gene expression.

[0302] In some embodiments, the systems and compositions described herein are for use in therapy. In some embodiments, the compositions described herein are for use in treating a disease or condition described herein. Also provided is the use of the compositions described herein in the manufacture of a medicament. Also provided is the use of the compositions described herein in the manufacture of a medicament for therapeutic and/or prophylactic treatment of a disease or condition described herein.

[0303] The compositions and methods described herein may be used to treat, prevent, or inhibit a disease or syndrome in a subject. In some embodiments, the disease is a liver disease, a lung disease, an eye disease, or a muscle disease. Exemplary diseases and syndromes include but are not limited to the diseases and syndromes listed in TABLE 12.

[0304] In some embodiments, compositions and methods modify the expression of at least one gene associated with a disease described herein or the expression thereof. In some embodiments, the disease is Alzheimer's disease and the gene is selected from APP, BACE-1, PSD95, MAPT, PSEN1, PSEN2, and APOEe4. In some embodiments, the disease is Parkinson's disease and the gene is selected from SNCA, GDNF, and LRRK2. In some embodiments, the disease is congenital muscular dystrophy 1A (MDC1A) and the gene is LAMA1 or LAMA2. In some embodiments, the disease is Ullrich Congenital Muscular Dystrophy (UCMD) and the gene is selected from COL6A1, COL6A2 and COL6A3. In some embodiments, the disease is Limb Girdle Muscular Dystrophies (LGMD1B, LGMD2A, LGMD2B) and the gene is selected from LMNA, DYSF, and CAPN3. In some embodiments, the disease is Nemaline Myopathy and the gene is selected from ACTA1, NEB, TPM2, TPM3, TNNT1, TNNT3, TNNI2 and LMOD3. In some embodiments, the disease comprises Centronuclear myopathy and the gene is DNM2. In some embodiments, the disease is Huntington's disease and the gene is HTT. In some embodiments, the disease is Alpha-1 antitrypsin deficiency (AATD) and the gene is SERPINA1. In some embodiments, the disease is amyotrophic lateral sclerosis (ALS) and the gene is selected from SOD1, FUS, C90RF72, ATXN2, TARDBP, and CHCHD10. In some embodiments, the disease comprises Alexander Disease and the gene is GFAP. In some embodiments, the disease comprises anaplastic large cell lymphoma and the gene is CD30. In some embodiments, the disease comprises Angelman Syndrome and the gene is UBE3A. In some embodiments, the disease comprises calcific aortic stenosis and the gene is Apo(a). In some embodiments, the disease comprises CD3Z-associated primary T-cell immunodeficiency and the gene is CD3Z or CD247. In some embodiments, the disease comprises CD18 deficiency and the gene is ITGB2. In some embodiments, the disease comprises CD40L deficiency and the gene is CD40L. In some embodiments, the disease is congenital adrenal hyperplasia and the gene is CAH1. In some embodiments, the disease comprises CNS trauma and the gene is VEGF. In some embodiments, the disease comprises coronary heart disease and the gene is selected from FGA, FGB, and FGG. In some embodiments, the disease comprises MECP2 Duplication syndrome and Rett syndrome and the gene is MECP2. In some embodiments, the disease comprises a bleeding disorder (coagulation) and the gene is FXI. In some embodiments, the disease comprises fragile X syndrome and the gene is FMR1. In some embodiments, the disease comprises Fuchs corneal dystrophy and the gene is selected from ZEB1, SLC4A11, and LOXHD1. In some embodiments, the disease comprises GM2-Gangliosidoses (e.g., Tay Sachs Disease, Sandhoff disease) and the gene is selected from HEXA and HEXB. In some embodiments, the disease comprises Hearing loss disorders and the gene is DFNA36. In some embodiments, the disease is Pompe disease, including infantile onset Pompe disease (IOPD) and late onset Pompe disease (LOPD) and the gene is GAA. In some embodiments, the disease is Retinitis pigmentosa and the gene is selected from PDE6B, RHO, RP1, RP2, RPGR, PRPH2, IMPDHI, PRPF31, CRB1, PRPF8, TULPI, CA4, HPRPF3, ABCA4, EYS, CERKL, FSCN2, TOPORS, SNRNP200, PRCD, NR2E3, MERTK, USH2A, PROM1, KLHL7, CNGBI, TTC8, ARL6, DHDDS, BEST1, LRAT, SPARA7, CRX, CLRN1, RPE65, and WDR19. In some embodiments, the disease comprises Leber Congenital Amaurosis Type 10 and the gene is CEP290. In some embodiments, the disease is cardiovascular disease and/or lipodystrophies and the gene is selected from ABCG5, ABCG8, AGT, ANGPTL3, APOCIII, APOA1, APOL1, ARH, CDKN2B, CFB, CXCL12, FXI, FXII, GATA-4, MIA3, MKL2, MTHFDIL, MYH7, NKX2-5, NOTCH1, PKK, PCSK9, PSRC1, SMAD3, and TTR. In some embodiments, the disease is cardiovascular disease and/or lipodystrophies and the gene is ANGPTL3. In some embodiments, the disease is cardiovascular disease and/or lipodystrophies and the gene is PCSK9. In some embodiments, the disease is cardiovascular disease and/or lipodystrophies and the gene is TTR. In some embodiments, the disease is severe hypertriglyceridemia (SHTG) and the gene is APOCIII or ANGPTL4. In some embodiments, the disease comprises acromegaly and the gene is GHR. In some embodiments, the disease comprises acute myeloid leukemia and the gene is CD22. In some embodiments, the disease is diabetes and the gene is GCGR. In some embodiments, the disease is NAFLD/NASH and the gene is selected from HSD17B13, PSD3, GPAM, CIDEB, DGAT2 and PNPLA3. In some embodiments, the disease is NASH/cirrhosis and the gene is MARC1. In some embodiments, the disease is cancer and the gene is selected from STAT3, YAP1, FOXP3, AR (Prostate cancer), and IRF4 (multiple myeloma). In some embodiments, the disease is cystic fibrosis and the gene is CFTR. In some embodiments, the disease is Duchenne muscular dystrophy and the gene is DMD. In some embodiments, the disease is ornithine transcarbamylase deficiency (OTCD) and the gene is OTC. In some embodiments, the disease is congenital adrenal hyperplasia (CAH) and the gene is CYP21A2. In some embodiments, the disease is atherosclerotic cardiovascular disease (ASCVD) and the gene is LPA. In some embodiments, the disease is hepatitis B virus infection (CHB) and the gene is HBV covalently closed circular DNA (cccDNA). In some embodiments, the disease is citrullinemia type I and the gene is ASS1. In some embodiments, the disease is citrullinemia type I and the gene is SLC25A13. In some embodiments, the disease is citrullinemia type I and the gene is ASS1. In some embodiments, the disease is arginase-1 deficiency and the gene is ARG1. In some embodiments, the disease is carbamoyl phosphate synthetase I deficiency and the gene is CPS1. In some embodiments, the disease is argininosuccinic aciduria and the gene is ASL. In some embodiments, the disease comprises angioedema and the gene is PKK. In some embodiments, the disease comprises thalassemia and the gene is TMPRSS6. In some embodiments, the disease comprises achondroplasia and the gene is FGFR3. In some embodiments, the disease comprises Cri du chat syndrome and the gene is selected from CTNND2. In some embodiments, the disease comprises sickle cell anemia and the gene is Beta globin gene. In some embodiments, the disease comprises Alagille Syndrome and the gene is selected from JAG1 and NOTCH2. In some embodiments, the disease comprises Charcot-Marie-Tooth disease and the gene is selected from PMP22 and MFN2. In some embodiments, the disease comprises Crouzon syndrome and the gene is selected from FGFR2, FGFR3, and FGFR3. In some embodiments, the disease comprises Dravet Syndrome and the gene is selected from SCN1A and SCN2A. In some embodiments, the disease comprises Emery-Dreifuss syndrome and the gene is selected from EMD, LMNA, SYNE1, SYNE2, FHL1, and TMEM43. In some embodiments, the disease comprises Factor V Leiden thrombophilia and the gene is F5. In some embodiments, the disease is fabry disease and the gene is GLA. In some embodiments, the disease is facioscapulohumeral muscular dystrophy (FSHD) and the gene is FSHD1. In some embodiments, the disease is facioscapulohumeral muscular dystrophy (FSHD) and the gene is DUX4. In some embodiments, the disease comprises Fanconi anemia and the gene is selected from FANCA, FANCB, FANCC, FANCD1, FANCD2, FANCE, FANCF, FANCG, FANCI, FANCJ, FANCL, FANCM, FANCN, FANCP, FANCS, RAD51C, and XPF. In some embodiments, the disease comprises Familial Creutzfeld-Jakob disease and the gene is PRNP. In some embodiments, the disease comprises Familial Mediterranean Fever and the gene is MEFV. In some embodiments, the disease comprises Friedreich's ataxia and the gene is FXN. In some embodiments, the disease comprises Gaucher disease and the gene is GBA. In some embodiments, the disease comprises human papilloma virus (HPV) infection and the gene is HPV E7. In some embodiments, the disease comprises hemochromatosis and the gene is HFE, optionally comprising a C282Y mutation. In some embodiments, the disease comprises Hemophilia A and the gene is FVIII. In some embodiments, the disease is hereditary angioedema and the gene is SERPING1 or KLKB1. In some embodiments, the disease comprises histiocytosis and the gene is CD1. In some embodiments, the disease comprises immunodeficiency 17 and the gene is CD3D. In some embodiments, the disease comprises immunodeficiency 13 and the gene is CD4. In some embodiments, the disease comprises Common Variable Immunodeficiency and the gene is selected from CD19 and CD81. In some embodiments, the disease comprises Joubert syndrome and the gene is selected from INPP5E, TMEM216, AHII, NPHPI, CEP290, TMEM67, RPGRIPIL, ARL13B, CC2D2A, OFD1, TMEM138, TCTN3, ZNF423, and AMRC9. In some embodiments, the disease comprises leukocyte adhesion deficiency and the gene is CD18. In some embodiments, the disease comprises Li-Fraumeni syndrome and the gene is TP53. In some embodiments, the disease comprises lymphoproliferative syndrome and the gene is CD27. In some embodiments, the disease comprises Lynch syndrome and the gene is selected from MSH2, MLH1, MSH6, PMS2, PMS1, TGFBR2, and MLH3. In some embodiments, the disease comprises mantle cell lymphoma and the gene is CD5. In some embodiments, the disease comprises Marfan syndrome and the gene is FBN1. In some embodiments, the disease comprises mastocytosis and the gene is CD2. In some embodiments, the disease comprises methylmalonic acidemia and the gene is selected from MMAA, MMAB, and MUT. In some embodiments, the disease is mycosis fungoides and the gene is CD7. In some embodiments, the disease is myotonic dystrophy and the gene is selected from CNBP and DMPK. In some embodiments, the disease comprises neurofibromatosis and the gene is selected from NF1, and NF2. In some embodiments, the disease comprises osteogenesis imperfecta and the gene is selected from COL1A1, COL1A2, and IFITM5. In some embodiments, the disease is non-small cell lung cancer and the gene is selected from KRAS, EGFR, ALK, METex14, BRAF V600E, ROSI, RET, and NTRK. In some embodiments, the disease comprises Peutz-Jeghers syndrome and the gene is STKI1. In some embodiments, the disease comprises polycystic kidney disease and the gene is selected from PKD1 and PKD2. In some embodiments, the disease comprises Severe Combined Immune Deficiency and the gene is selected from IL7R, RAG1, and JAK3. In some embodiments, the disease comprises PRKAG2 cardiac syndrome and the gene is PRKAG2. In some embodiments, the disease comprises spinocerebellar ataxia and the gene is selected from ATXN1, ATXN2, ATXN3, PLEKHG4, SPTBN2, CACNAIA, ATXN7, ATXN8OS, ATXN10, TTBK2, PPP2R2B, KCNC3, PRKCG, ITPRI, TBP, KCND3, and FGF14. In some embodiments, the disease is thrombophilia due to antithrombin III deficiency and the gene is SERPINC1. In some embodiments the disease is spinal muscular atrophy and the gene is SMN1. In some embodiments, the disease comprises Usher Syndrome and the gene is selected from MYO7A, USHIC, CDH23, PCDH15, USHIG, USH2A, GPR98, DFNB31, and CLRN1. In some embodiments, the disease comprises von Willebrand disease and the gene is VWF. In some embodiments, the disease comprises Waardenburg syndrome and the gene is selected from PAX3, MITF, WS2B, WS2C, SNAI2, EDNRB, EDN3, and SOX10. In some embodiments, the disease comprises Wiskott-Aldrich Syndrome and the gene is WAS. In some embodiments, the disease comprises von Hippel-Lindau disease and the gene is VHL. In some embodiments, the disease comprises Wilson disease and the gene is ATP7B. In some embodiments, the disease comprises Zellweger syndrome and the gene is selected from PEX1, PEX2, PEX3, PEX5, PEX6, PEX10, PEX12, PEX13, PEX14, PEX16, PEX19, and PEX26. In some embodiments, the disease comprises infantile myofibromatosis and the gene is CD34. In some embodiments, the disease comprises platelet glycoprotein IV deficiency and the gene is CD36. In some embodiments, the disease comprises immunodeficiency with hyper-IgM type 3 and the gene is CD40. In some embodiments, the disease comprises hemolytic uremic syndrome and the gene is CD46. In some embodiments, the disease comprises complement hyperactivation, angiopathic thrombosis, or protein-losing enteropathy and the gene is CD55. In some embodiments, the disease comprises hemolytic anemia and the gene is CD59. In some embodiments, the disease comprises calcification of joints and arteries and the gene is CD73. In some embodiments, the disease comprises immunoglobulin alpha deficiency and the gene is CD79A. In some embodiments, the disease comprises C syndrome and the gene is CD96. In some embodiments, the disease comprises hairy cell leukemia and the gene is CD123. In some embodiments, the disease comprises histiocytic sarcoma and the gene is CD163. In some embodiments, the disease comprises autosomal dominant deafness and the gene is CD164. In some embodiments, the disease comprises immunodeficiency 25 and the gene is CD247. In some embodiments, the disease comprises methymalonic acidemia due to transcobalamin receptor defect and the gene is CD320.

### Cancer

[0305] In some embodiments, the disease is cancer. Non-limiting examples of cancers include: acute lymphoblastic leukemia; acute lymphoblastic lymphoma; acute lymphocytic leukemia; acute myelogenous leukemia; acute myeloid leukemia (adult/childhood); adrenocortical carcinoma; AIDS-related cancers; AIDS-related lymphoma; anal cancer; appendix cancer; astrocytoma; atypical teratoid/rhabdoid tumor; basal-cell carcinoma; bile duct cancer; extrahepatic (cholangiocarcinoma); bladder cancer; bone osteosarcoma/malignant fibrous histiocytoma; brain cancer (adult/childhood); brain tumor; cerebellar astrocytoma (adult/childhood); brain tumor, cerebral astrocytoma/malignant glioma brain tumor; brain tumor, ependymoma; brain tumor, medulloblastoma; brain tumor, supratentorial primitive neuroectodermal tumors; brain tumor, visual pathway and hypothalamic glioma; brainstem glioma; breast cancer; bronchial adenomas/carcinoids; bronchial tumor; Burkitt lymphoma; cancer of childhood; carcinoid gastrointestinal tumor; carcinoid tumor; carcinoma of adult, unknown primary site; carcinoma of unknown primary; central nervous system embryonal tumor; central nervous system lymphoma, primary; cervical cancer; childhood adrenocortical carcinoma; childhood cancers; childhood cerebral astrocytoma; chordoma, childhood; chronic lymphocytic leukemia; chronic myelogenous leukemia; chronic myeloid leukemia; chronic myeloproliferative disorders; colon cancer; colorectal cancer; craniopharyngioma; cutaneous T-cell lymphoma; desmoplastic small round cell tumor; emphysema; endometrial cancer; ependymoblastoma; ependymoma; esophageal cancer; Ewing sarcoma in the Ewing family of tumors; extracranial germ cell tumor; extragonadal germ cell tumor; extrahepatic bile duct cancer; gallbladder cancer; gastric (stomach) cancer; gastric carcinoid; gastrointestinal carcinoid tumor; gastrointestinal stromal tumor; germ cell tumor: extracranial, extragonadal, or ovarian gestational trophoblastic tumor; gestational trophoblastic tumor, unknown primary site; glioma; glioma of the brain stem; glioma, childhood visual pathway and hypothalamic; hairy cell leukemia; head and neck cancer; heart cancer; hepatocellular (liver cancer); Hodgkin's lymphoma; hypopharyngeal cancer; hypothalamic and visual pathway glioma; intraocular melanoma; islet cell carcinoma (endocrine pancreas); Kaposi Sarcoma; kidney cancer (renal cell cancer); Langerhans cell histiocytosis; laryngeal cancer; lip and oral cavity cancer; liposarcoma; liver cancer (primary); lung cancer, non-small cell; lung cancer, small cell; lymphoma, primary central nervous system; macroglobulinemia, Waldenstrom; male breast cancer; malignant fibrous histiocytoma of bone/osteosarcoma; medulloblastoma; medulloepithelioma; melanoma; melanoma, intraocular (eye); Merkel cell cancer; Merkel cell skin carcinoma; mesothelioma; mesothelioma, adult malignant; metastatic squamous neck cancer with occult primary; mouth cancer; multiple endocrine neoplasia syndrome; multiple myeloma/plasma cell neoplasm; mycosis fungoides, myelodysplastic syndromes; myelodysplastic/myeloproliferative diseases; myelogenous leukemia, chronic; myeloid leukemia, adult acute; myeloid leukemia, childhood acute; myeloma, multiple (cancer of the bone-marrow); myeloproliferative disorders, chronic; nasal cavity and paranasal sinus cancer; nasopharyngeal carcinoma; neuroblastoma, non-small cell lung cancer; non-Hodgkin's lymphoma; oligodendroglioma; oral cancer; oral cavity cancer; oropharyngeal cancer; osteosarcoma/malignant fibrous histiocytoma of bone; ovarian cancer; ovarian epithelial cancer (surface epithelial-stromal tumor); ovarian germ cell tumor; ovarian low malignant potential tumor; pancreatic cancer; pancreatic cancer; pituitary tumor, islet cell; papillomatosis; paranasal sinus and nasal cavity cancer; parathyroid cancer; penile cancer; pharyngeal cancer; pheochromocytoma; pineal astrocytoma; pineal germinoma; pineal parenchymal tumors of intermediate differentiation; pineoblastoma and supratentorial primitive neuroectodermal tumors; pituitary tumor; pituitary adenoma; plasma cell neoplasia/multiple myeloma; pleuropulmonary blastoma; primary central nervous system lymphoma; prostate cancer; rectal cancer; renal cell carcinoma (kidney cancer); renal pelvis and ureter, transitional cell cancer; NUT midline carcinoma; retinoblastoma; rhabdomyosarcoma, childhood; salivary gland cancer; sarcoma, Ewing family of tumors; Sèzary syndrome; skin cancer (melanoma); skin cancer (non-melanoma); small cell lung cancer; small intestine cancer soft tissue sarcoma; soft tissue sarcoma; spinal cord tumor; squamous cell carcinoma; squamous neck cancer with occult primary, metastatic; stomach (gastric) cancer; supratentorial primitive neuroectodermal tumor; T-cell lymphoma, cutaneous (Mycosis Fungoides and Sèzary syndrome); testicular cancer; throat cancer; thymoma; thymoma and thymic carcinoma; thyroid cancer; thyroid cancer, childhood; transitional cell cancer of the renal pelvis and ureter; urethral cancer; uterine cancer, endometrial; uterine sarcoma; vaginal cancer; vulvar cancer; and Wilms Tumor.

[0306] In some embodiments, mutations are associated with cancer or are causative of cancer. The target nucleic acid, in some embodiments, comprises a portion of a gene comprising a mutation associated with cancer, a gene whose overexpression is associated with cancer, a tumor suppressor gene, an oncogene, a checkpoint inhibitor gene, a gene associated with cellular growth, a gene associated with cellular metabolism, a gene associated with cell cycle, or combinations thereof. Non-limiting examples of genes comprising a mutation associated with cancer are ABL, ACE, AF4/HRX, AKT-2, ALK, ALK/NPM, AML1, AML1/MTG8, APC, ATM, AXIN2, AXL, BAP1, BARD1, BCL-2, BCL-3, BCL-6, BCR/ABL, BLM, BMPR1A, BRCA1, BRCA2, BRIP1, c-MYC, CASR, CCR5, CDC73, CDHL, CDK4, CDKN1B, CDKN1C, CDKN2A, CEBPA, CHEK2, CREBBP, CTNNA1, DBL, DEK/CAN, DICER1, DIS3L2, E2A/PBX1, EGFR, ENI/HRX, EPCAM, ERG/TLS, ERBB, ERBB-2, ETS-1, EWS/FLI-1, FH, FKRP, FLCN, FMS, FOS, FPS, GATA2, GCG, GLI, GPC3, GPGSP, GREM1, HER2/neu, HOX11, HOXB13, HRAS, HST, IL-3, INT-2, JAK1, JUN, KIT, KS3, K-SAM, LBC, LCK, LMO1, LMO2, L-MYC, LYL-1, LYT-10, LYT-10/Cal, MAS, MAX, MDM-2, MEN1, MET, MITF, MLH1, MLL, MOS, MSHL, MSH2, MSH3, MSH6, MTG8/AML1, MUTYH, MYB, MYH11/CBFB, NBN, NEU, NFL, NF2, N-MYC, NTHL1, OST, PALB2, PAX-5, PBX1/E2A, PCDCl, PDGFRA, PHOX2B, PIM-1, PMS2, POLD1, POLE, POT1, PPARG, PRAD-1, PRKAR1A, PTCH1, PTEN, RAD50, RAD51C, RAD51D, RAF, RAR/PML, RAS-H, RAS-K, RAS-N, RB1, RECQL4, REL/NRG, RET, RHOM1, RHOM2, ROS, RUNX1, SDHA, SDHAF, SDHAF2, SDHB, SDHC, SDHD, SET/CAN, SIS, SKI, SMAD4, SMARCA4, SMARCB1, SMARCEL, SRC, STKI1, SUFU, TAL1, TAL2, TAN-1, TIAM1, TERC, TERT, TIMP3, TMEM127, TNF, TP53, TRAC, TSCL, TSC2, TRK, VHL, WRN, and WTI. Non-limiting examples of oncogenes are KRAS, NRAS, BRAF, MYC, CTNNB1, and EGFR. In some embodiments, the oncogene is a gene that encodes a cyclin dependent kinase (CDK). Non-limiting examples of CDKs are Cdk1, Cdk4, Cdk5, Cdk7, Cdk8, Cdk9, Cdk11 and Cdk20. Non-limiting examples of tumor suppressor genes are TP53, RB1, and PTEN.

### Infections

[0307] Described herein are compositions, systems, and methods for treating an infection in a subject. Infections may be caused by a pathogen (e.g., bacteria, viruses, fungi, and parasites). Compositions, systems, and methods may modify a target nucleic acid associated with the pathogen or parasite causing the infection. In some embodiments, the target nucleic acid may be in the pathogen or parasite itself or in a cell, tissue or organ of the subject that the pathogen or parasite infects. In some embodiments, the methods described herein include treating an infection caused by one or more bacterial pathogens. Non-limiting examples of bacterial pathogens include Acholeplasma laidlawii, Brucella abortus, Chlamydia psittaci, Chlamydia trachomatis, Cryptococcus neoformans, Escherichia coli, Legionella pneumophila, Lyme disease spirochetes, methicillin-resistant Staphylococcus aureus, Mycobacterium leprae, Mycobacterium tuberculosis, Mycoplasma arginini, Mycoplasma arthritidis, Mycoplasma genitalium, Mycoplasma hyorhinis, Mycoplasma orale, Mycoplasma pneumoniae, Mycoplasma salivarium, Neisseria gonorrhoeae, Neisseria meningitidis, Pneumococcus, Pseudomonas aeruginosa, sexually transmitted infection, Streptococcus agalactiae, Streptococcus pyogenes, and Treponema pallidum.

[0308] In some embodiments, compositions, systems or methods described herein may treat an infection caused by one or more viral pathogens. Non-limiting examples of viral pathogens include adenovirus, blue tongue virus, chikungunya, coronavirus (e.g., SARS-CoV-2), cytomegalovirus, Dengue virus, Ebola, Epstein-Barr virus, feline leukemia virus, Hemophilus influenzae B, Hepatitis Virus A, Hepatitis Virus B, Hepatitis Virus C, herpes simplex virus I, herpes simplex virus II, human papillomavirus (HPV) including HPV16 and HPV18, human serum parvo-like virus, human T-cell leukemia viruses, immunodeficiency virus (e.g., HIV), influenza virus, lymphocytic choriomeningitis virus, measles virus, mouse mammary tumor virus, mumps virus, murine leukemia virus, polio virus, rabies virus, Reovirus, respiratory syncytial virus (RSV), rubella virus, Sendai virus, simian virus 40, Sindbis virus, varicella-zoster virus, vesicular stomatitis virus, wart virus, West Nile virus, yellow fever virus, or any combination thereof.

[0309] In some embodiments, compositions, systems or methods described herein may treat an infection caused by one or more parasites. Non-limiting examples of parasites include helminths, annelids, platyhelminthes, nematodes, and thorny-headed worms. In some embodiments, parasitic pathogens comprise, without limitation, Babesia bovis, Echinococcus granulosus, Eimeria tenella, Leishmania tropica, Mesocestoides corti, Onchocerca volvulus, Plasmodium falciparum, Plasmodium vivax, Schistosoma japonicum, Schistosoma mansoni, Schistosoma spp., Taenia hydatigena, Taenia ovis, Taenia saginata, Theileria parva, Toxoplasma gondii, Toxoplasma spp., Trichinella spiralis, Trichomonas vaginalis, Trypanosoma brucei, Trypanosoma cruzi, Trypanosoma rangeli, Trypanosoma rhodesiense, Balantidium coli, Entamoeba histolytica, Giardia spp., Isospora spp., Trichomonas spp., or any combination thereof.

### Sequences and Tables

[0310] TABLE 1 provides illustrative amino acid sequences of effector proteins that are useful in the compositions, systems and methods described herein.

TABLE 1
EXEMPLARY AMINO ACID SEQUENCE(S) OF EFFECTOR PROTEIN(S)

| | SEQ | |
|---|---|---|
| | ID | |
| Name | NO: | Sequence |
| CasPhi.12 | 1 | MIKPTVSQFLTPGFKLIRNHSRTAGLKLKNEGEEA |
| | | CKKFVRENEIPKDECPNFQGGPAIANIIAKSREFT |
| | | EWEIYQSSLAIQEVIFTLPKDKLPEPILKEEWRAQ |
| | | WLSEHGLDTVPYKEAAGLNLIIKNAVNTYKGVQVK |
| | | VDNKNKNNLAKINRKNEIAKLNGEQEISFEEIKAF |
| | | DDKGYLLQKPSPNKSIYCYQSVSPKPFITSKYHNV |
| | | NLPEEYIGYYRKSNEPIVSPYQFDRLRIPIGEPGY |
| | | VPKWQYTFLSKKENKRRKLSKRIKNVSPILGIICI |
| | | KKDWCVFDMRGLLRTNHWKKYHKPTDSINDLFDYF |
| | | TGDPVIDTKANVVRFRYKMENGIVNYKPVREKKGK |
| | | ELLENICDQNGSCKLATVDVGQNNPVAIGLFELKK |
| | | VNGELTKTLISRHPTPIDFCNKITAYRERYDKLES |
| | | SIKLDAIKQLTSEQKIEVDNYNNNFTPQNTKQIVC |
| | | SKLNINPNDLPWDKMISGTHFISEKAQVSNKSEIY |
| | | FTSTDKGKTKDVMKSDYKWFQDYKPKLSKEVRDAL |
| | | SDIEWRLRRESLEFNKLSKSREQDARQLANWISSM |
| | | CDVIGIENLVKKNNFFGGSGKREPGWDNFYKPKKE |
| | | NRWWINAIHKALTELSQNKGKRVILLPAMRTSITC |
| | | PKCKYCDSKNRNGEKFNCLKCGIELNADIDVATEN |
| | | LATVAITAQSMPKPTCERSGDAKKPVRARKAKAPE |
| | | FHDKLAPSYTVVLREAV |
| dCasPhi12 | 2 | MIKPTVSQFLTPGFKLIRNHSRTAGRKLKNEGEEA |
| (L26R_E567Q) | | CKKFVRENEIPKDECPNFQGGPAIANIIAKSREFT |
| | | EWEIYQSSLAIQEVIFTLPKDKLPEPILKEEWRAQ |
| | | WLSEHGLDTVPYKEAAGLNLIIKNAVNTYKGVQVK |
| | | VDNKNKNNLAKINRKNEIAKLNGEQEISFEEIKAF |
| | | DDKGYLLQKPSPNKSIYCYQSVSPKPFITSKYHNV |
| | | NLPEEYIGYYRKSNEPIVSPYQFDRLRIPIGEPGY |
| | | VPKWQYTFLSKKENKRRKLSKRIKNVSPILGIICI |
| | | KKDWCVFDMRGLLRTNHWKKYHKPTDSINDLFDYF |
| | | TGDPVIDTKANVVRFRYKMENGIVNYKPVREKKGK |
| | | ELLENICDQNGSCKLATVDVGQNNPVAIGLFELKK |
| | | VNGELTKTLISRHPTPIDFCNKITAYRERYDKLES |
| | | SIKLDAIKQLTSEQKIEVDNYNNNFTPQNTKQIVC |
| | | SKLNINPNDLPWDKMISGTHFISEKAQVSNKSEIY |
| | | FTSTDKGKTKDVMKSDYKWFQDYKPKLSKEVRDAL |
| | | SDIEWRLRRESLEFNKLSKSREQDARQLANWISSM |
| | | CDVIGIQNLVKKNNFFGGSGKREPGWDNFYKPKKE |
| | | NRWWINAIHKALTELSQNKGKRVILLPAMRTSITC |
| | | PKCKYCDSKNRNGEKFNCLKCGIELNADIDVATEN |
| | | LATVAITAQSMPKPTCERSGDAKKPVRARKAKAPE |
| | | FHDKLAPSYTVVLREAV |
| CasM.265466 | 35 | MSVLTRKVQLIPVGDKEERDRVYKYLRDGIEAQNR |
| | | AMNLYMSGLYFAAINEASKEDRKELNQLYSRIATS |
| | | SKGSAYTTDIEFPTGLASTSTLSMAVRQDFTKSLK |
| | | DGLMYGRVSLPTYRKDNPLFVDVRFVALRGTKQKY |
| | | NGLYHEYKSHTEFLDNLYSSDLKVYIKFANDITFQ |
| | | VIFGNPRKSSALRSEFQNIFEEYYKVCQSSIQFSG |
| | | TKIILNMAMDIPDKEIELDEDVCVGVDLGIAIPAV |
| | | CALNKNRYSRVSIGSKEDFLRVRTKIRNQRKRLQT |
| | | NLKSSNGGHGRKKKMKPMDRFRDYEANWVQNYNHY |
| | | VSRQVVDFAVKNKAKYINLENLEGIRDDVKNEWLL |
| | | SNWSYYQLQQYITYKAKTYGIEVRKINPYHTSQRC |
| | | SCCGYEDAGNRPKKEKGQAYFKCLKCGEEMNADFN |
| | | AARNIAMSTEFQSGKKTKKQKKEQHENK |
| dCasM.265466 | 2950 | MSVLTRKVQLIPVGDKEERDRVYKYLRDGIEAQNR |
| (D220R_E335Q) | | AMNLYMSGLYFAAINEASKEDRKELNQLYSRIATS |
| | | SKGSAYTTDIEFPTGLASTSTLSMAVRQDFTKSLK |
| | | DGLMYGRVSLPTYRKDNPLFVDVRFVALRGTKQKY |
| | | NGLYHEYKSHTEFLDNLYSSDLKVYIKFANDITFQ |
| | | VIFGNPRKSSALRSEFQNIFEEYYKVCQSSIQFSG |
| | | TKIILNMAMRIPDKEIELDEDVCVGVDLGIAIPAV |
| | | CALNKNRYSRVSIGSKEDFLRVRTKIRNQRKRLQT |
| | | NLKSSNGGHGRKKKMKPMDRFRDYEANWVQNYNHY |
| | | VSRQVVDFAVKNKAKYINLQNLEGIRDDVKNEWLL |
| | | SNWSYYQLQQYITYKAKTYGIEVRKINPYHTSQRC |
| | | SCCGYEDAGNRPKKEKGQAYFKCLKCGEEMNADFN |
| | | AARNIAMSTEFQSGKKTKKQKKEQHENK |
| dCasM.288886 | 3010 | MSLITRKIQIYVSEEDKELKKQFVHTIYDWRNQIR |
| | | RAANIVVSHKFTQENIKDFVYLKDEIKEKFYVKDI |
| | | LKEGKGMSEQNTTYRVLADLLKGKIPSDIYSCLNQ |
| | | AVAKTFKETKSEIFKGETALRSYKNNIPVPFSSDS |
| | | IRNLHWEEKDKRFYFTLFGIPFATALGADRSNNKV |
| | | IIERVLSGEYKLCQSSIQIDDRKKKMFLLLCVDIP |
| | | KKEVKLNPDKKLYAFLGVFNPIVCTTEITDDLDAK |
| | | NPYKVWEIGTEEEFNHRRRQIQEAVKRCQINSRYT |
| | | EGGKGIKKKTKAIDRFHEKEKNYIDTKLHTYSRML |
| | | VDLAIKNECSEIVLMKQKEREEMAKEDNQNGKPFV |
| | | LRNWSYYGLKDKISYKAKMVGIGITVE |
| dCasM.288094 | 3011 | MIITRKIEIYVNESDKDKKAEYYDRLFKILYTVHR |
| | | FANLCASHLYFADNIADFVYLTTDARDKVKFSENL |
| | | LTDSKKKDEGILISSYDNLVYELSKTFPEEERKGI |
| | | TKILADTGNRIIKAYKKKTDGESERLMIKRGKRSV |
| | | KNYKLNIPIPFSKQSFKIEKSGNDYIFDFYHIPFK |
| | | TKCGKDKSGNRIIINRLLAGEYDLSDSSIQYAKKY |
| | | DRETGKAVSKWMLQLCVNIPETRLQAKKGVKVKAD |
| | | LNLVVPIIATCGKITREFGTKEEFLYQRIQIQSKL |
| | | KNLQKSLRWANGGNGRKAKLQAIERFKLKEKNYIK |
| | | TKLHAYSRALVNFAIKERAEKIELVNQKLKEEMAK |
| | | DLEPVLRNWSYYGLKQMIEYKAMRVGINVELN |
| dCasM.2401960 | 3012 | MPTVTRKIQLFFDIGDNPKELKALFKKWYEWQRIV |
| | | RKAANQISTHLYIQDNIKDFFYITEDVKIKLKKSA |
| | | DDVAGILNTSKDNTTYQVLSKLFKGDCPMGMLSGL |
| | | SSVIGNTYKKEKKEMFLGNKSLRSYKKDIPLPMRV |
| | | RDSSNWTKHEDGNYSFSVYGTPFKTWFGHEKKKVT |
| | | NDTHTKEYMLDMAMKGEVKFCDSSIQIKDNKFFLL |
| | | AVESWEKDVIKVDTENVADCYLSIKYPIIIKEGKD |
| | | RMYTIGSEEEYLHGRNSIKAALQRVQTGAKYNQGG |
| | | DGRELKLQSIERFKAAEKNFIENRMHVYARELIKY |
| | | CLKHGKGKIVLNNYNEAKEQTHEGTEEANLLLASW |
| | | SYYNLSDKIANKAAYHSIVVEKN |

[0311] TABLE 2 provides illustrative sequences of exemplary heterologous polypeptide modifications of effector protein(s) that are useful in the compositions, systems and methods described herein.

TABLE 2
EXEMPLARY NUCLEAR LOCALIZATOIN SIGNALS

| SEQ ID NO: | Description | Sequence* |
|---|---|---|
| 3 | SV40 NLS | MAPKKKRKVGIHGVPAA |
| 4 | Nucleoplasm NLS | KRPAATKKAGQAKKKKEF |

[0312] TABLE 3 provides illustrative PAM sequences that are useful in the compositions, systems and methods described herein.

TABLE 3
EXEMPLARY PAM SEQUENCES

| Effector Protein | PAM Sequence* |
|---|---|
| SEQ ID NO: | (5′→3′) |
| 1 | NTTN |
| 3 | NNTR, NNTN |

*wherein each N is independently any one of A, G, C, or T

[0313] TABLE 4 provides exemplary effector partners.

TABLE 4
EXEMPLARY EFFECTOR PARTNERS

| | SEQ ID | |
|---|---|---|
| Name | NO: | Sequence |
| DNMT3A | 10 | MNHDQEFDPPKVYPPVPAEKRKPIRVLSLFDGIATGLLVLKDLGIQVDRYIASEVCEDSITVGMV |
| | | RHQGKIMYVGDVRSVTQKHIQEWGPFDLVIGGSPCNDLSIVNPARKGLYEGTGRLFFEFYRLLH |
| | | DARPKEGDDRPFFWLFENVVAMGVSDKRDISRFLESNPVMIDAKEVSAAHRARYFWGNLPGM |
| | | NRPLASTVNDKLELQECLEHGRIAKFSKVRTITTRSNSIKQGKDQHFPVFMNEKEDILWCTEMER |
| | | VFGFPVHYTDVSNMSRLARQRLLGRSWSVPVIRHLFAPLKEYFACV |
| DNMT3L | 11 | MGPMEIYKTVSAWKRQPVRVLSLFRNIDKVLKSLGFLESGSGSGGGTLKYVEDVTNVVRRDVE |
| | | KWGPFDLVYGSTQPLGSSCDRCPGWYMFQFHRILQYALPRQESQRPFFWIFMDNLLLTEDDQET |
| | | TTRFLQTEAVTLQDVRGRDYQNAMRVWSNIPGLKSKHAPLTPKEEEYLQAQVRSRSKLDAPKV |
| | | DLLVKNCLLPLREYFKYFSQNSLPL |
| KRAB | 12 | MDAKSLTAWSRTLVTFKDVFVDFTREEWKLLDTAQQIVYRNVMLENYKNLVSLGYQLTKPDV |
| (ZNF10) | | ILRLEKGEEPWLV |
| KRAB | 3005 | MDAKSLTAWSRTLVTFKDVFVDFTREEWKLLDTAQQIVYRNVMLENYKNLVSLGYQLTKPDV |
| (ZNF10)- | | ILRLEKGEEPWLVESGPGTSTEPSEGSAPGSPAMKDKVEKEKSEKETTSKKNSHKKTRPRLK |
| YAF2 | | NVDRSSAQHLEVTVGDLTVIITDFKEKTKSPPASSAASADQHSQSGSSSDNT |
| | | wherein bold represents KRAB(ZNF10), |
| | | italics represent YAF2 (Yaf2/RYBP C-terminal binding motif), |
| | | and regular font represents a linker |
| KRAB | 3006 | MDAKSLTAWSRTLVTFKDVFVDFTREEWKLLDTAQQIVYRNVMLENYKNLVSLGYQLTKPDV |
| (ZNF10)- | | ILRLEKGEEPWLVESGPGTSTEPSEGSAPGSPAMAEAFGDSEEDGEDVFEVEKILDMKTEGG |
| MPP8 | | KVLYKVRWKGYTSDDDTWEPEIHLEDCKEVLLEFRKKIAENKAKAVRKDIQR |
| | | wherein bold represents KRAB(ZNF10), |
| | | italics represent MPP8 chromodomain, and regular font |
| | | represents a linker |
| KRAB | 3007 | MDAKSLTAWSRTLVTFKDVFVDFTREEWKLLDTAQQIVYRNVMLENYKNLVSLGYQLTKPDV |
| (ZNF10)- | | ILRLEKGEEPWLVESGPGTSTEPSEGSAPGSPAMPSEANSIQSANATTKTSETNHTSRPRLK |
| RYBP | | NVDRSTAQQLAVTVGNVTVIITDFKEKTRSSSTSSSTVTSSAGSEQQNQSSS |
| | | wherein bold represents KRAB(ZNF10), |
| | | italics represent RYBP (Yaf2/RYBP C-terminal binding motif), |
| | | and regular font represents a linker |
| CBX3VD | 3008 | MEEAEPDEFVVEKVLDRRVVNGKVEYFLKWEGFTDADNTWEPEENLDCPELIEAFLNSQKSR |
| -KRAB | | SSGGGSGGSGSMNNSQGRVTFEDVTVNFTQGEWQRLNPEQRNLYRDVMLENYSNLVSVGQGE |
| (ZIM3) | | TTKPDVILRLEQGKEPWLEEEEVLGSGRAEKNGDIGGQIWKPKDVKESL |
| | | wherein bold represents CBX3 (chromodomain, Q9D, K33E), |
| | | italics represent ZIM3 (KRAB domain), |
| | | and regular font represents a linker |
| CBX5VD | 3009 | MEDEYVVEKVLDRRVVKGQVEYLLKWEGFSEEHNTWEPEKNLDCPELISEFMKKYKKMKEGE |
| -KRAB | | NSRSSGGGSGGSGSMNNSQGRVTFEDVTVNFTQGEWQRLNPEQRNLYRDVMLENYSNLVSVG |
| (ZIM3) | | QGETTKPDVILRLEQGKEPWLEEEEVLGSGRAEKNGDIGGQIWKPKDVKESL |
| | | wherein bold represents CBX5 (chromodomain, Q9D, K33E), |
| | | italics represent ZIM3 (KRAB domain), |
| | | and regular font represents a linker |

[0314] TABLE 5 provides exemplary peptide linkers.

TABLE 5
EXEMPLARY PEPTIDE LINKERS

| Name | SEQ ID NO | Sequence |
|---|---|---|
| XTEN20 | 13 | GSPAGSPTSTEEGTSESATP |
| XTEN54 | 14 | GGPSSGAPPPSGGSPAGSPTST |
| | | EEGTSESATPESGPGTSTEPSE |
| | | GSAPGSPAGS |
| DNMT linker | 15 | SSGNSNANSRGPSFSSGLVPLS |
| | | LRGSH |

[0315] TABLE 6 provides exemplary fusion protein sequences.

TABLE 6
FUSION CONSTRUCTS TESTED FOR THE REPRESSION OF GFP EXPRESSION

| | | SEQ |
|---|---|---|
| | | ID |
| Description | Amino Acid Sequence | NO |
| DNMT3A- | MNHDQEFDPPKVYPPVPAEKRKPIRVLSLFDGIATGLLVLKDLGIQVDRYIASEV | 16 |
| DNMT3L- | CEDSITVGMVRHQGKIMYVGDVRSVTQKHIQEWGPFDLVIGGSPCNDLSIVNPAR | |
| NLS- | KGLYEGTGRLFFEFYRLLHDARPKEGDDRPFFWLFENVVAMGVSDKRDISRFLES | |
| dCasPhi12( | NPVMIDAKEVSAAHRARYFWGNLPGMNRPLASTVNDKLELQECLEHGRIAKFSKV | |
| L26R_E567 | RTITTRSNSIKQGKDQHFPVFMNEKEDILWCTEMERVFGFPVHYTDVSNMSRLAR | |
| Q)-NLS- | QRLLGRSWSVPVIRHLFAPLKEYFACVSSGNSNANSRGPSFSSGLVPLSLRGSHM | |
| KRAB | GPMEIYKTVSAWKRQPVRVLSLFRNIDKVLKSLGFLESGSGSGGGTLKYVEDVTN | |
| | VVRRDVEKWGPFDLVYGSTQPLGSSCDRCPGWYMFQFHRILQYALPRQESQRPFF | |
| | WIFMDNLLLTEDDQETTTRFLQTEAVTLQDVRGRDYQNAMRVWSNIPGLKSKHAP | |
| | LTPKEEEYLQAQVRSRSKLDAPKVDLLVKNCLLPLREYFKYFSQNSLPLGGPSSG | |
| | APPPSGGSPAGSPTSTEEGTSESATPESGPGTSTEPSEGSAPGSPAGSMAPKKKR | |
| | KVGIHGVPAAMIKPTVSQFLTPGFKLIRNHSRTAGRKLKNEGEEACKKFVRENEI | |
| | PKDECPNFQGGPAIANIIAKSREFTEWEIYQSSLAIQEVIFTLPKDKLPEPILKE | |
| | EWRAQWLSEHGLDTVPYKEAAGLNLIIKNAVNTYKGVQVKVDNKNKNNLAKINRK | |
| | NEIAKLNGEQEISFEEIKAFDDKGYLLQKPSPNKSIYCYQSVSPKPFITSKYHNV | |
| | NLPEEYIGYYRKSNEPIVSPYQFDRLRIPIGEPGYVPKWQYTFLSKKENKRRKLS | |
| | KRIKNVSPILGIICIKKDWCVFDMRGLLRTNHWKKYHKPTDSINDLFDYFTGDPV | |
| | IDTKANVVRFRYKMENGIVNYKPVREKKGKELLENICDQNGSCKLATVDVGQNNP | |
| | VAIGLFELKKVNGELTKTLISRHPTPIDFCNKITAYRERYDKLESSIKLDAIKQL | |
| | TSEQKIEVDNYNNNFTPQNTKQIVCSKLNINPNDLPWDKMISGTHFISEKAQVSN | |
| | KSEIYFTSTDKGKTKDVMKSDYKWFQDYKPKLSKEVRDALSDIEWRLRRESLEFN | |
| | KLSKSREQDARQLANWISSMCDVIGIQNLVKKNNFFGGSGKREPGWDNFYKPKKE | |
| | NRWWINAIHKALTELSQNKGKRVILLPAMRTSITCPKCKYCDSKNRNGEKFNCLK | |
| | CGIELNADIDVATENLATVAITAQSMPKPTCERSGDAKKPVRARKAKAPEFHDKL | |
| | APSYTVVLREAVKRPAATKKAGQAKKKKEFGSPAGSPTSTEEGTSESATPMDAKS | |
| | LTAWSRTLVTFKDVFVDFTREEWKLLDTAQQIVYRNVMLENYKNLVSLGYQLTKP | |
| | DVILRLEKGEEPWLV | |
| KRAB- | MDAKSLTAWSRTLVTFKDVFVDFTREEWKLLDTAQQIVYRNVMLENYKNLVSLGY | 17 |
| NLS- | QLTKPDVILRLEKGEEPWLVGSPAGSPTSTEEGTSESATPMAPKKKRKVGIHGVP | |
| dCasPhi12( | AAMIKPTVSQFLTPGFKLIRNHSRTAGRKLKNEGEEACKKFVRENEIPKDECPNF | |
| L26R_E567 | QGGPAIANIIAKSREFTEWEIYQSSLAIQEVIFTLPKDKLPEPILKEEWRAQWLS | |
| Q)-NLS- | EHGLDTVPYKEAAGLNLIIKNAVNTYKGVQVKVDNKNKNNLAKINRKNEIAKLNG | |
| DNMT3L- | EQEISFEEIKAFDDKGYLLQKPSPNKSIYCYQSVSPKPFITSKYHNVNLPEEYIG | |
| DNMT3A | YYRKSNEPIVSPYQFDRLRIPIGEPGYVPKWQYTFLSKKENKRRKLSKRIKNVSP | |
| | ILGIICIKKDWCVFDMRGLLRTNHWKKYHKPTDSINDLFDYFTGDPVIDTKANVV | |
| | RFRYKMENGIVNYKPVREKKGKELLENICDQNGSCKLATVDVGQNNPVAIGLFEL | |
| | KKVNGELTKTLISRHPTPIDFCNKITAYRERYDKLESSIKLDAIKQLTSEQKIEV | |
| | DNYNNNFTPQNTKQIVCSKLNINPNDLPWDKMISGTHFISEKAQVSNKSEIYFTS | |
| | TDKGKTKDVMKSDYKWFQDYKPKLSKEVRDALSDIEWRLRRESLEFNKLSKSREQ | |
| | DARQLANWISSMCDVIGIQNLVKKNNFFGGSGKREPGWDNFYKPKKENRWWINAI | |
| | HKALTELSQNKGKRVILLPAMRTSITCPKCKYCDSKNRNGEKFNCLKCGIELNAD | |
| | IDVATENLATVAITAQSMPKPTCERSGDAKKPVRARKAKAPEFHDKLAPSYTVVL | |
| | REAVKRPAATKKAGQAKKKKEFGGPSSGAPPPSGGSPAGSPTSTEEGTSESATPE | |
| | SGPGTSTEPSEGSAPGSPAGSMGPMEIYKTVSAWKRQPVRVLSLFRNIDKVLKSL | |
| | GFLESGSGSGGGTLKYVEDVTNVVRRDVEKWGPFDLVYGSTQPLGSSCDRCPGWY | |
| | MFQFHRILQYALPRQESQRPFFWIFMDNLLLTEDDQETTTRFLQTEAVTLQDVRG | |
| | RDYQNAMRVWSNIPGLKSKHAPLTPKEEEYLQAQVRSRSKLDAPKVDLLVKNCLL | |
| | PLREYFKYFSQNSLPLSSGNSNANSRGPSFSSGLVPLSLRGSHMNHDQEFDPPKV | |
| | YPPVPAEKRKPIRVLSLFDGIATGLLVLKDLGIQVDRYIASEVCEDSITVGMVRH | |
| | QGKIMYVGDVRSVTQKHIQEWGPFDLVIGGSPCNDLSIVNPARKGLYEGTGRLFF | |
| | EFYRLLHDARPKEGDDRPFFWLFENVVAMGVSDKRDISRFLESNPVMIDAKEVSA | |
| | AHRARYFWGNLPGMNRPLASTVNDKLELQECLEHGRIAKFSKVRTITTRSNSIKQ | |
| | GKDQHFPVFMNEKEDILWCTEMERVFGFPVHYTDVSNMSRLARQRLLGRSWSVPV | |
| | IRHLFAPLKEYFACV | |
| KRAB- | MDAKSLTAWSRTLVTFKDVFVDFTREEWKLLDTAQQIVYRNVMLENYKNLVSLGY | 18 |
| NLS- | QLTKPDVILRLEKGEEPWLVGSPAGSPTSTEEGTSESATPMAPKKKRKVGIHGVP | |
| dCasPhi12 | AAMIKPTVSQFLTPGFKLIRNHSRTAGRKLKNEGEEACKKFVRENEIPKDECPNF | |
| (L26R_E567 | QGGPAIANIIAKSREFTEWEIYQSSLAIQEVIFTLPKDKLPEPILKEEWRAQWLS | |
| Q)-NLS- | EHGLDTVPYKEAAGLNLIIKNAVNTYKGVQVKVDNKNKNNLAKINRKNEIAKLNG | |
| DNMT3L | EQEISFEEIKAFDDKGYLLQKPSPNKSIYCYQSVSPKPFITSKYHNVNLPEEYIG | |
| | YYRKSNEPIVSPYQFDRLRIPIGEPGYVPKWQYTFLSKKENKRRKLSKRIKNVSP | |
| | ILGIICIKKDWCVFDMRGLLRTNHWKKYHKPTDSINDLFDYFTGDPVIDTKANVV | |
| | RFRYKMENGIVNYKPVREKKGKELLENICDQNGSCKLATVDVGQNNPVAIGLFEL | |
| | KKVNGELTKTLISRHPTPIDFCNKITAYRERYDKLESSIKLDAIKQLTSEQKIEV | |
| | DNYNNNFTPQNTKQIVCSKLNINPNDLPWDKMISGTHFISEKAQVSNKSEIYFTS | |
| | TDKGKTKDVMKSDYKWFQDYKPKLSKEVRDALSDIEWRLRRESLEFNKLSKSREQ | |
| | DARQLANWISSMCDVIGIQNLVKKNNFFGGSGKREPGWDNFYKPKKENRWWINAI | |
| | HKALTELSQNKGKRVILLPAMRTSITCPKCKYCDSKNRNGEKFNCLKCGIELNAD | |
| | IDVATENLATVAITAQSMPKPTCERSGDAKKPVRARKAKAPEFHDKLAPSYTVVL | |
| | REAVKRPAATKKAGQAKKKKEFGGPSSGAPPPSGGSPAGSPTSTEEGTSESATPE | |
| | SGPGTSTEPSEGSAPGSPAGSMGPMEIYKTVSAWKRQPVRVLSLFRNIDKVLKSL | |
| | GFLESGSGSGGGTLKYVEDVTNVVRRDVEKWGPFDLVYGSTQPLGSSCDRCPGWY | |
| | MFQFHRILQYALPRQESQRPFFWIFMDNLLLTEDDQETTTRFLQTEAVTLQDVRG | |
| | RDYQNAMRVWSNIPGLKSKHAPLTPKEEEYLQAQVRSRSKLDAPKVDLLVKNCLL | |
| | PLREYFKYFSQNSLPL | |
| NLS- | MAPKKKRKVGIHGVPAAMIKPTVSQFLTPGFKLIRNHSRTAGRKLKNEGEEACKK | 19 |
| dCasPhi12 | FVRENEIPKDECPNFQGGPAIANIIAKSREFTEWEIYQSSLAIQEVIFTLPKDKL | |
| (L26R_E567 | PEPILKEEWRAQWLSEHGLDTVPYKEAAGLNLIIKNAVNTYKGVQVKVDNKNKNN | |
| Q)-NLS- | LAKINRKNEIAKLNGEQEISFEEIKAFDDKGYLLQKPSPNKSIYCYQSVSPKPFI | |
| DNMT3L- | TSKYHNVNLPEEYIGYYRKSNEPIVSPYQFDRLRIPIGEPGYVPKWQYTFLSKKE | |
| KRAB | NKRRKLSKRIKNVSPILGIICIKKDWCVFDMRGLLRTNHWKKYHKPTDSINDLFD | |
| | YFTGDPVIDTKANVVRFRYKMENGIVNYKPVREKKGKELLENICDQNGSCKLATV | |
| | DVGQNNPVAIGLFELKKVNGELTKTLISRHPTPIDFCNKITAYRERYDKLESSIK | |
| | LDAIKQLTSEQKIEVDNYNNNFTPQNTKQIVCSKLNINPNDLPWDKMISGTHFIS | |
| | EKAQVSNKSEIYFTSTDKGKTKDVMKSDYKWFQDYKPKLSKEVRDALSDIEWRLR | |
| | RESLEFNKLSKSREQDARQLANWISSMCDVIGIQNLVKKNNFFGGSGKREPGWDN | |
| | FYKPKKENRWWINAIHKALTELSQNKGKRVILLPAMRTSITCPKCKYCDSKNRNG | |
| | EKFNCLKCGIELNADIDVATENLATVAITAQSMPKPTCERSGDAKKPVRARKAKA | |
| | PEFHDKLAPSYTVVLREAVKRPAATKKAGQAKKKKEFGGPSSGAPPPSGGSPAGS | |
| | PTSTEEGTSESATPESGPGTSTEPSEGSAPGSPAGSMGPMEIYKTVSAWKRQPVR | |
| | VLSLFRNIDKVLKSLGFLESGSGSGGGTLKYVEDVTNVVRRDVEKWGPFDLVYGS | |
| | TQPLGSSCDRCPGWYMFQFHRILQYALPRQESQRPFFWIFMDNLLLTEDDQETTT | |
| | RFLQTEAVTLQDVRGRDYQNAMRVWSNIPGLKSKHAPLTPKEEEYLQAQVRSRSK | |
| | LDAPKVDLLVKNCLLPLREYFKYFSQNSLPLGSPAGSPTSTEEGTSESATPMDAK | |
| | SLTAWSRTLVTFKDVFVDFTREEWKLLDTAQQIVYRNVMLENYKNLVSLGYQLTK | |
| | PDVILRLEKGEEPWLV | |
| DNMT3L- | MGPMEIYKTVSAWKRQPVRVLSLFRNIDKVLKSLGFLESGSGSGGGTLKYVEDVT | 20 |
| KRAB- | NVVRRDVEKWGPFDLVYGSTQPLGSSCDRCPGWYMFQFHRILQYALPRQESQRPF | |
| NLS- | FWIFMDNLLLTEDDQETTTRFLQTEAVTLQDVRGRDYQNAMRVWSNIPGLKSKHA | |
| dCasPhi12 | PLTPKEEEYLQAQVRSRSKLDAPKVDLLVKNCLLPLREYFKYFSQNSLPLGGPSS | |
| (L26R_E567 | GAPPPSGGSPAGSPTSTEEGTSESATPESGPGTSTEPSEGSAPGSPAGSMDAKSL | |
| Q)-NLS | TAWSRTLVTFKDVFVDFTREEWKLLDTAQQIVYRNVMLENYKNLVSLGYQLTKPD | |
| | VILRLEKGEEPWLVGSPAGSPTSTEEGTSESATPMAPKKKRKVGIHGVPAAMIKP | |
| | TVSQFLTPGFKLIRNHSRTAGRKLKNEGEEACKKFVRENEIPKDECPNFQGGPAI | |
| | ANIIAKSREFTEWEIYQSSLAIQEVIFTLPKDKLPEPILKEEWRAQWLSEHGLDT | |
| | VPYKEAAGLNLIIKNAVNTYKGVQVKVDNKNKNNLAKINRKNEIAKLNGEQEISF | |
| | EEIKAFDDKGYLLQKPSPNKSIYCYQSVSPKPFITSKYHNVNLPEEYIGYYRKSN | |
| | EPIVSPYQFDRLRIPIGEPGYVPKWQYTFLSKKENKRRKLSKRIKNVSPILGIIC | |
| | IKKDWCVFDMRGLLRTNHWKKYHKPTDSINDLFDYFTGDPVIDTKANVVRFRYKM | |
| | ENGIVNYKPVREKKGKELLENICDQNGSCKLATVDVGQNNPVAIGLFELKKVNGE | |
| | LTKTLISRHPTPIDFCNKITAYRERYDKLESSIKLDAIKQLTSEQKIEVDNYNNN | |
| | FTPQNTKQIVCSKLNINPNDLPWDKMISGTHFISEKAQVSNKSEIYFTSTDKGKT | |
| | KDVMKSDYKWFQDYKPKLSKEVRDALSDIEWRLRRESLEFNKLSKSREQDARQLA | |
| | NWISSMCDVIGIQNLVKKNNFFGGSGKREPGWDNFYKPKKENRWWINAIHKALTE | |
| | LSQNKGKRVILLPAMRTSITCPKCKYCDSKNRNGEKFNCLKCGIELNADIDVATE | |
| | NLATVAITAQSMPKPTCERSGDAKKPVRARKAKAPEFHDKLAPSYTVVLREAVKR | |
| | PAATKKAGQAKKKKEF | |
| KRAB- | MDAKSLTAWSRTLVTFKDVFVDFTREEWKLLDTAQQIVYRNVMLENYKNLVSLGY | 21 |
| NLS- | QLTKPDVILRLEKGEEPWLVGSPAGSPTSTEEGTSESATPMAPKKKRKVGIHGVP | |
| dCasPhi12- | AAMIKPTVSQFLTPGFKLIRNHSRTAGRKLKNEGEEACKKFVRENEIPKDECPNF | |
| NLS | QGGPAIANIIAKSREFTEWEIYQSSLAIQEVIFTLPKDKLPEPILKEEWRAQWLS | |
| | EHGLDTVPYKEAAGLNLIIKNAVNTYKGVQVKVDNKNKNNLAKINRKNEIAKLNG | |
| | EQEISFEEIKAFDDKGYLLQKPSPNKSIYCYQSVSPKPFITSKYHNVNLPEEYIG | |
| | YYRKSNEPIVSPYQFDRLRIPIGEPGYVPKWQYTFLSKKENKRRKLSKRIKNVSP | |
| | ILGIICIKKDWCVFDMRGLLRTNHWKKYHKPTDSINDLFDYFTGDPVIDTKANVV | |
| | RFRYKMENGIVNYKPVREKKGKELLENICDQNGSCKLATVDVGQNNPVAIGLFEL | |
| | KKVNGELTKTLISRHPTPIDFCNKITAYRERYDKLESSIKLDAIKQLTSEQKIEV | |
| | DNYNNNFTPQNTKQIVCSKLNINPNDLPWDKMISGTHFISEKAQVSNKSEIYFTS | |
| | TDKGKTKDVMKSDYKWFQDYKPKLSKEVRDALSDIEWRLRRESLEFNKLSKSREQ | |
| | DARQLANWISSMCDVIGIQNLVKKNNFFGGSGKREPGWDNFYKPKKENRWWINAI | |
| | HKALTELSQNKGKRVILLPAMRTSITCPKCKYCDSKNRNGEKFNCLKCGIELNAD | |
| | IDVATENLATVAITAQSMPKPTCERSGDAKKPVRARKAKAPEFHDKLAPSYTVVL | |
| | REAVKRPAATKKAGQAKKKKEF | |
| dCasPhi.12- | MAPKKKRKVGIHGVPAAMIKPTVSQFLTPGFKLIRNHSRTAGRKLKNEGEEACKK | 3004 |
| DNMT3L | FVRENEIPKDECPNFQGGPAIANIIAKSREFTEWEIYQSSLAIQEVIFTLPKDKL | |
| | PEPILKEEWRAQWLSEHGLDTVPYKEAAGLNLIIKNAVNTYKGVQVKVDNKNKNN | |
| | LAKINRKNEIAKLNGEQEISFEEIKAFDDKGYLLQKPSPNKSIYCYQSVSPKPFI | |
| | TSKYHNVNLPEEYIGYYRKSNEPIVSPYQFDRLRIPIGEPGYVPKWQYTFLSKKE | |
| | NKRRKLSKRIKNVSPILGIICIKKDWCVFDMRGLLRTNHWKKYHKPTDSINDLFD | |
| | YFTGDPVIDTKANVVRFRYKMENGIVNYKPVREKKGKELLENICDQNGSCKLATV | |
| | DVGQNNPVAIGLFELKKVNGELTKTLISRHPTPIDFCNKITAYRERYDKLESSIK | |
| | LDAIKQLTSEQKIEVDNYNNNFTPQNTKQIVCSKLNINPNDLPWDKMISGTHFIS | |
| | EKAQVSNKSEIYFTSTDKGKTKDVMKSDYKWFQDYKPKLSKEVRDALSDIEWRLR | |
| | RESLEFNKLSKSREQDARQLANWISSMCDVIGIQNLVKKNNFFGGSGKREPGWDN | |
| | FYKPKKENRWWINAIHKALTELSQNKGKRVILLPAMRTSITCPKCKYCDSKNRNG | |
| | EKFNCLKCGIELNADIDVATENLATVAITAQSMPKPTCERSGDAKKPVRARKAKA | |
| | PEFHDKLAPSYTVVLREAVKRPAATKKAGQAKKKKEFGGPSSGAPPPSGGSPAGS | |
| | PTSTEEGTSESATPESGPGTSTEPSEGSAPGSPAGSMGPMEIYKTVSAWKRQPVR | |
| | VLSLFRNIDKVLKSLGFLESGSGSGGGTLKYVEDVTNVVRRDVEKWGPFDLVYGS | |
| | TQPLGSSCDRCPGWYMFQFHRILQYALPRQESQRPFFWIFMDNLLLTEDDQETTT | |
| | RFLQTEAVTLQDVRGRDYQNAMRVWSNIPGLKSKHAPLTPKEEEYLQAQVRSRSK | |
| | LDAPKVDLLVKNCLLPLREYFKYFSQNSLPLGSPAGSPTSTEEGTSESATP | |
| | wherein italics represent NLSs, | |
| | bold represents dCasPhi.12(L26R, E567Q), | |
| | regular font represents mouse Dnmt31 | |
| | (C terminus domain), and | |
| | double underline represents linker | |

[0316] TABLE 7 provides illustrative repeat sequences for use in guide nucleic acids that are useful in the compositions, systems and methods described herein.

TABLE 7
EXEMPLARY REPEAT SEQUENCES FOR USE
IN GUIDE NUCLEIC ACIDS

| Effector | | Repeat |
|---|---|---|
| Protein | Repeat Sequence | Sequence |
| SEQ | (5′ → 3′), | SEQ ID |
| ID NO: | shown as RNA | NO: |
| 1 | AUUGCUCCUUACGAGGAGAC | 5 |
| 1 | GAUUGCUCCUUACGAGGAGAC | 6 |
| 1 | AGAUUGCUCCUUACGAGGAGAC | 7 |
| 1 | UAGAUUGCUCCUUACGAGGAGAC | 8 |
| 1 | AUAGAUUGCUCCUUACGAGGAGAC | 9 |

[0317] TABLE 8 provides illustrative handle sequences for use in guide nucleic acids that are useful in the compositions, systems and methods described herein.

TABLE 8
EXEMPLARY HANDLE SEQUENCES FOR USE IN
GUIDE NUCLEIC ACIDS

| Effector | Handle Sequence | Repeat |
|---|---|---|
| Protein SEQ | (5′ → 3′), | Sequence |
| ID NO: | shown as RNA | SEQ ID NO: |
| 3 | ACAGCUUAUUUGGAAGC | 36 |
| | UGAAAUGUGAGGUUUAU | |
| | AACACUCACAAGAAUCC | |
| | UGAAAAAGGAUGCCAAA | |
| | C | |

[0318] TABLE 9 provides exemplary spacer sequences and full guide nucleic acid sequences for targeting human APOC3, human PCSK9, human ANGPTL3, mouse Apoc3, and mouse Pcsk9 for CasPhi.12 effector protein.

TABLE 9
EXEMPLARY SPACER SEQUENCES AND FULL GUIDE
NUCLEIC ACID SEQUENCES FOR CASPHI.12

| | | Spacer | gRNA |
|---|---|---|---|
| | | Sequence | SEQ ID |
| Spacer ID | Target | SEQ ID NO: | NO: |
| 132842 | human APOC3 | 37 | 529 |
| 132843 | human APOC3 | 38 | 530 |
| 132844 | human APOC3 | 39 | 531 |
| 132845 | human APOC3 | 40 | 532 |
| 132846 | human APOC3 | 41 | 533 |
| 132847 | human APOC3 | 42 | 534 |
| 132848 | human APOC3 | 43 | 535 |
| 132849 | human APOC3 | 44 | 536 |
| 132850 | human APOC3 | 45 | 537 |
| 132851 | human APOC3 | 46 | 538 |
| 132852 | human APOC3 | 47 | 539 |
| 132853 | human APOC3 | 48 | 540 |
| 132854 | human APOC3 | 49 | 541 |
| 132855 | human APOC3 | 50 | 542 |
| 132856 | human APOC3 | 51 | 543 |
| 132857 | human APOC3 | 52 | 544 |
| 132858 | human APOC3 | 53 | 545 |
| 132859 | human APOC3 | 54 | 546 |
| 132860 | human APOC3 | 55 | 547 |
| 132861 | human APOC3 | 56 | 548 |
| 132862 | human APOC3 | 57 | 549 |
| 132863 | human APOC3 | 58 | 550 |
| 132864 | human APOC3 | 59 | 551 |
| 132865 | human APOC3 | 60 | 552 |
| 132866 | human APOC3 | 61 | 553 |
| 132867 | human APOC3 | 62 | 554 |
| 132868 | human APOC3 | 63 | 555 |
| 132869 | human APOC3 | 64 | 556 |
| 132870 | human APOC3 | 65 | 557 |
| 132871 | human APOC3 | 66 | 558 |
| 132872 | human APOC3 | 67 | 559 |
| 132873 | human APOC3 | 68 | 560 |
| 132874 | human APOC3 | 69 | 561 |
| 132875 | human APOC3 | 70 | 562 |
| 132876 | human APOC3 | 71 | 563 |
| 132877 | human APOC3 | 72 | 564 |
| 132878 | human APOC3 | 73 | 565 |
| 132879 | human APOC3 | 74 | 566 |
| 132880 | human APOC3 | 75 | 567 |
| 132881 | human APOC3 | 76 | 568 |
| 132882 | human APOC3 | 77 | 569 |
| 132883 | human APOC3 | 78 | 570 |
| 132884 | human APOC3 | 79 | 571 |
| 132885 | human APOC3 | 80 | 572 |
| 132886 | human APOC3 | 81 | 573 |
| 132887 | human APOC3 | 82 | 574 |
| 132888 | human APOC3 | 83 | 575 |
| 132889 | human APOC3 | 84 | 576 |
| 132890 | human APOC3 | 85 | 577 |
| 132891 | human APOC3 | 86 | 578 |
| 132892 | human APOC3 | 87 | 579 |
| 132893 | human APOC3 | 88 | 580 |
| 132894 | human APOC3 | 89 | 581 |
| 132895 | human APOC3 | 90 | 582 |
| 132896 | human APOC3 | 91 | 583 |
| 132897 | human APOC3 | 92 | 584 |
| 132898 | human APOC3 | 93 | 585 |
| 132899 | human APOC3 | 94 | 586 |
| 132900 | human APOC3 | 95 | 587 |
| 132901 | human APOC3 | 96 | 588 |
| 132902 | human APOC3 | 97 | 589 |
| 132903 | human APOC3 | 98 | 590 |
| 132904 | human APOC3 | 99 | 591 |
| 132905 | human APOC3 | 100 | 592 |
| 132906 | human APOC3 | 101 | 593 |
| 132907 | human APOC3 | 102 | 594 |
| 132908 | human APOC3 | 103 | 595 |
| 132909 | human APOC3 | 104 | 596 |
| 132910 | human APOC3 | 105 | 597 |
| 132911 | human APOC3 | 106 | 598 |
| 132912 | human APOC3 | 107 | 599 |
| 132913 | human APOC3 | 108 | 600 |
| 132914 | human APOC3 | 109 | 601 |
| 132915 | human PCSK9 | 110 | 602 |
| 132916 | human PCSK9 | 111 | 603 |
| 132917 | human PCSK9 | 112 | 604 |
| 132918 | human PCSK9 | 113 | 605 |
| 132919 | human PCSK9 | 114 | 606 |
| 132920 | human PCSK9 | 115 | 607 |
| 132921 | human PCSK9 | 116 | 608 |
| 132922 | human PCSK9 | 117 | 609 |
| 132923 | human PCSK9 | 118 | 610 |
| 132924 | human PCSK9 | 119 | 611 |
| 132925 | human PCSK9 | 120 | 612 |
| 132926 | human PCSK9 | 121 | 613 |
| 132927 | human PCSK9 | 122 | 614 |
| 132928 | human PCSK9 | 123 | 615 |
| 132929 | human PCSK9 | 124 | 616 |
| 132930 | human PCSK9 | 125 | 617 |
| 132931 | human PCSK9 | 126 | 618 |
| 132932 | human PCSK9 | 127 | 619 |
| 132933 | human PCSK9 | 128 | 620 |
| 132934 | human PCSK9 | 129 | 621 |
| 132935 | human PCSK9 | 130 | 622 |
| 132936 | human PCSK9 | 131 | 623 |
| 132937 | human PCSK9 | 132 | 624 |
| 132938 | human PCSK9 | 133 | 625 |
| 132939 | human PCSK9 | 134 | 626 |
| 132940 | human PCSK9 | 135 | 627 |
| 132941 | human PCSK9 | 136 | 628 |
| 132942 | human PCSK9 | 137 | 629 |
| 132943 | human PCSK9 | 138 | 630 |
| 132944 | human PCSK9 | 139 | 631 |
| 132945 | human PCSK9 | 140 | 632 |
| 132946 | human PCSK9 | 141 | 633 |
| 132947 | human PCSK9 | 142 | 634 |
| 132948 | human PCSK9 | 143 | 635 |
| 132949 | human PCSK9 | 144 | 636 |
| 132950 | human PCSK9 | 145 | 637 |
| 132951 | human PCSK9 | 146 | 638 |
| 132952 | human PCSK9 | 147 | 639 |
| 132953 | human PCSK9 | 148 | 640 |
| 132954 | human PCSK9 | 149 | 641 |
| 132955 | human PCSK9 | 150 | 642 |
| 132956 | human PCSK9 | 151 | 643 |
| 132957 | human PCSK9 | 152 | 644 |
| 132958 | human PCSK9 | 153 | 645 |
| 132959 | human PCSK9 | 154 | 646 |
| 132960 | human PCSK9 | 155 | 647 |
| 132961 | human PCSK9 | 156 | 648 |
| 132962 | human PCSK9 | 157 | 649 |
| 132963 | human PCSK9 | 158 | 650 |
| 132964 | human PCSK9 | 159 | 651 |
| 132965 | human PCSK9 | 160 | 652 |
| 132966 | human PCSK9 | 161 | 653 |
| 132967 | human PCSK9 | 162 | 654 |
| 132968 | human PCSK9 | 163 | 655 |
| 132969 | human PCSK9 | 164 | 656 |
| 132970 | human PCSK9 | 165 | 657 |
| 132971 | human PCSK9 | 166 | 658 |
| 132972 | human PCSK9 | 167 | 659 |
| 132973 | human PCSK9 | 168 | 660 |
| 132974 | human PCSK9 | 169 | 661 |
| 132975 | human PCSK9 | 170 | 662 |
| 132976 | human PCSK9 | 171 | 663 |
| 132977 | human PCSK9 | 172 | 664 |
| 132978 | human PCSK9 | 173 | 665 |
| 132979 | human PCSK9 | 174 | 666 |
| 132980 | human PCSK9 | 175 | 667 |
| 132981 | human PCSK9 | 176 | 668 |
| 132982 | human PCSK9 | 177 | 669 |
| 132983 | human ANGPTL3 | 178 | 670 |
| 132984 | human ANGPTL3 | 179 | 671 |
| 132985 | human ANGPTL3 | 180 | 672 |
| 132986 | human ANGPTL3 | 181 | 673 |
| 132987 | human ANGPTL3 | 182 | 674 |
| 132988 | human ANGPTL3 | 183 | 675 |
| 132989 | human ANGPTL3 | 184 | 676 |
| 132990 | human ANGPTL3 | 185 | 677 |
| 132991 | human ANGPTL3 | 186 | 678 |
| 132992 | human ANGPTL3 | 187 | 679 |
| 132993 | human ANGPTL3 | 188 | 680 |
| 132994 | human ANGPTL3 | 189 | 681 |
| 132995 | human ANGPTL3 | 190 | 682 |
| 132996 | human ANGPTL3 | 191 | 683 |
| 132997 | human ANGPTL3 | 192 | 684 |
| 132998 | human ANGPTL3 | 193 | 685 |
| 132999 | human ANGPTL3 | 194 | 686 |
| 133000 | human ANGPTL3 | 195 | 687 |
| 133001 | human ANGPTL3 | 196 | 688 |
| 133002 | human ANGPTL3 | 197 | 689 |
| 133003 | human ANGPTL3 | 198 | 690 |
| 133004 | human ANGPTL3 | 199 | 691 |
| 133005 | human ANGPTL3 | 200 | 692 |
| 133006 | human ANGPTL3 | 201 | 693 |
| 133007 | human ANGPTL3 | 202 | 694 |
| 133008 | human ANGPTL3 | 203 | 695 |
| 133009 | human ANGPTL3 | 204 | 696 |
| 133010 | human ANGPTL3 | 205 | 697 |
| 133011 | human ANGPTL3 | 206 | 698 |
| 133012 | human ANGPTL3 | 207 | 699 |
| 133013 | human ANGPTL3 | 208 | 700 |
| 133014 | human ANGPTL3 | 209 | 701 |
| 133015 | human ANGPTL3 | 210 | 702 |
| 133016 | human ANGPTL3 | 211 | 703 |
| 133017 | human ANGPTL3 | 212 | 704 |
| 133018 | human ANGPTL3 | 213 | 705 |
| 133019 | human ANGPTL3 | 214 | 706 |
| 133020 | human ANGPTL3 | 215 | 707 |
| 133021 | human ANGPTL3 | 216 | 708 |
| 133022 | human ANGPTL3 | 217 | 709 |
| 133023 | human ANGPTL3 | 218 | 710 |
| 133024 | human ANGPTL3 | 219 | 711 |
| 133025 | human ANGPTL3 | 220 | 712 |
| 133026 | human ANGPTL3 | 221 | 713 |
| 133027 | human ANGPTL3 | 222 | 714 |
| 133028 | human ANGPTL3 | 223 | 715 |
| 133029 | human ANGPTL3 | 224 | 716 |
| 133030 | human ANGPTL3 | 225 | 717 |
| 133031 | human ANGPTL3 | 226 | 718 |
| 133032 | human ANGPTL3 | 227 | 719 |
| 133033 | human ANGPTL3 | 228 | 720 |
| 133034 | human ANGPTL3 | 229 | 721 |
| 133035 | human ANGPTL3 | 230 | 722 |
| 133036 | human ANGPTL3 | 231 | 723 |
| 133037 | human ANGPTL3 | 232 | 724 |
| 133038 | human ANGPTL3 | 233 | 725 |
| 133039 | human ANGPTL3 | 234 | 726 |
| 133040 | human ANGPTL3 | 235 | 727 |
| 133041 | human ANGPTL3 | 236 | 728 |
| 133042 | human ANGPTL3 | 237 | 729 |
| 133043 | human ANGPTL3 | 238 | 730 |
| 133044 | human ANGPTL3 | 239 | 731 |
| 133045 | human ANGPTL3 | 240 | 732 |
| 133046 | human ANGPTL3 | 241 | 733 |
| 133047 | human ANGPTL3 | 242 | 734 |
| 133048 | human ANGPTL3 | 243 | 735 |
| 133049 | human ANGPTL3 | 244 | 736 |
| 133050 | human ANGPTL3 | 245 | 737 |
| 133051 | human ANGPTL3 | 246 | 738 |
| 133052 | human ANGPTL3 | 247 | 739 |
| 133053 | human ANGPTL3 | 248 | 740 |
| 133054 | human ANGPTL3 | 249 | 741 |
| 133055 | human ANGPTL3 | 250 | 742 |
| 133056 | human ANGPTL3 | 251 | 743 |
| 133057 | human ANGPTL3 | 252 | 744 |
| 133058 | human ANGPTL3 | 253 | 745 |
| 133059 | human ANGPTL3 | 254 | 746 |
| 133060 | human ANGPTL3 | 255 | 747 |
| 133061 | human ANGPTL3 | 256 | 748 |
| 133062 | human ANGPTL3 | 257 | 749 |
| 133063 | human ANGPTL3 | 258 | 750 |
| 133064 | human ANGPTL3 | 259 | 751 |
| 133065 | human ANGPTL3 | 260 | 752 |
| 133066 | human ANGPTL3 | 261 | 753 |
| 133067 | human ANGPTL3 | 262 | 754 |
| 133068 | human ANGPTL3 | 263 | 755 |
| 133069 | human ANGPTL3 | 264 | 756 |
| 133070 | human ANGPTL3 | 265 | 757 |
| 133071 | human ANGPTL3 | 266 | 758 |
| 133072 | human ANGPTL3 | 267 | 759 |
| 133073 | human ANGPTL3 | 268 | 760 |
| 133074 | human ANGPTL3 | 269 | 761 |
| 133075 | human ANGPTL3 | 270 | 762 |
| 133076 | human ANGPTL3 | 271 | 763 |
| 133077 | human ANGPTL3 | 272 | 764 |
| 133078 | human ANGPTL3 | 273 | 765 |
| 133079 | human ANGPTL3 | 274 | 766 |
| 133080 | human ANGPTL3 | 275 | 767 |
| 133081 | human ANGPTL3 | 276 | 768 |
| 133082 | human ANGPTL3 | 277 | 769 |
| 133083 | human ANGPTL3 | 278 | 770 |
| 133084 | human ANGPTL3 | 279 | 771 |
| 133085 | human ANGPTL3 | 280 | 772 |
| 133086 | human ANGPTL3 | 281 | 773 |
| 133087 | human ANGPTL3 | 282 | 774 |
| 133088 | human ANGPTL3 | 283 | 775 |
| 133089 | human ANGPTL3 | 284 | 776 |
| 133090 | human ANGPTL3 | 285 | 777 |
| 133091 | human ANGPTL3 | 286 | 778 |
| 133092 | human ANGPTL3 | 287 | 779 |
| 133093 | human ANGPTL3 | 288 | 780 |
| 133094 | human ANGPTL3 | 289 | 781 |
| 133095 | human ANGPTL3 | 290 | 782 |
| 133096 | human ANGPTL3 | 291 | 783 |
| 133097 | human ANGPTL3 | 292 | 784 |
| 133098 | human ANGPTL3 | 293 | 785 |
| 133099 | human ANGPTL3 | 294 | 786 |
| 133100 | human ANGPTL3 | 295 | 787 |
| 133101 | human ANGPTL3 | 296 | 788 |
| 133102 | human ANGPTL3 | 297 | 789 |
| 133103 | human ANGPTL3 | 298 | 790 |
| 133104 | human ANGPTL3 | 299 | 791 |
| 133105 | human ANGPTL3 | 300 | 792 |
| 133106 | human ANGPTL3 | 301 | 793 |
| 133107 | human ANGPTL3 | 302 | 794 |
| 133108 | human ANGPTL3 | 303 | 795 |
| 133109 | human ANGPTL3 | 304 | 796 |
| 133110 | human ANGPTL3 | 305 | 797 |
| 133111 | human ANGPTL3 | 306 | 798 |
| 133112 | human ANGPTL3 | 307 | 799 |
| 133113 | human ANGPTL3 | 308 | 800 |
| 133114 | human ANGPTL3 | 309 | 801 |
| 133115 | human ANGPTL3 | 310 | 802 |
| 133116 | human ANGPTL3 | 311 | 803 |
| 133117 | human ANGPTL3 | 312 | 804 |
| 133118 | human ANGPTL3 | 313 | 805 |
| 133119 | human ANGPTL3 | 314 | 806 |
| 133120 | human ANGPTL3 | 315 | 807 |
| 133121 | human ANGPTL3 | 316 | 808 |
| 133122 | human ANGPTL3 | 317 | 809 |
| 133123 | human ANGPTL3 | 318 | 810 |
| 133124 | human ANGPTL3 | 319 | 811 |
| 133125 | human ANGPTL3 | 320 | 812 |
| 133126 | human ANGPTL3 | 321 | 813 |
| 133127 | human ANGPTL3 | 322 | 814 |
| 133128 | human ANGPTL3 | 323 | 815 |
| 133129 | human ANGPTL3 | 324 | 816 |
| 133130 | human ANGPTL3 | 325 | 817 |
| 133131 | human ANGPTL3 | 326 | 818 |
| 133132 | human ANGPTL3 | 327 | 819 |
| 133133 | human ANGPTL3 | 328 | 820 |
| 133134 | human ANGPTL3 | 329 | 821 |
| 133135 | human ANGPTL3 | 330 | 822 |
| 133136 | human ANGPTL3 | 331 | 823 |
| 133137 | human ANGPTL3 | 332 | 824 |
| 133138 | human ANGPTL3 | 333 | 825 |
| 133139 | human ANGPTL3 | 334 | 826 |
| 133140 | human ANGPTL3 | 335 | 827 |
| 133141 | human ANGPTL3 | 336 | 828 |
| 133142 | human ANGPTL3 | 337 | 829 |
| 133143 | human ANGPTL3 | 338 | 830 |
| 133144 | human ANGPTL3 | 339 | 831 |
| 133145 | human ANGPTL3 | 340 | 832 |
| 133146 | human ANGPTL3 | 341 | 833 |
| 133147 | human ANGPTL3 | 342 | 834 |
| 133148 | human ANGPTL3 | 343 | 835 |
| 133149 | human ANGPTL3 | 344 | 836 |
| 133150 | human ANGPTL3 | 345 | 837 |
| 133151 | human ANGPTL3 | 346 | 838 |
| 133152 | human ANGPTL3 | 347 | 839 |
| 133153 | human ANGPTL3 | 348 | 840 |
| 133154 | human ANGPTL3 | 349 | 841 |
| 133155 | human ANGPTL3 | 350 | 842 |
| 133156 | human ANGPTL3 | 351 | 843 |
| 133157 | human ANGPTL3 | 352 | 844 |
| 133158 | human ANGPTL3 | 353 | 845 |
| 133159 | human ANGPTL3 | 354 | 846 |
| 133160 | human ANGPTL3 | 355 | 847 |
| 133161 | human ANGPTL3 | 356 | 848 |
| 133162 | human ANGPTL3 | 357 | 849 |
| 133163 | human ANGPTL3 | 358 | 850 |
| 133164 | human ANGPTL3 | 359 | 851 |
| 143961 | mouse Apoc3 | 360 | 852 |
| 143962 | mouse Apoc3 | 361 | 853 |
| 143963 | mouse Apoc3 | 362 | 854 |
| 143964 | mouse Apoc3 | 363 | 855 |
| 143965 | mouse Apoc3 | 364 | 856 |
| 143966 | mouse Apoc3 | 365 | 857 |
| 143967 | mouse Apoc3 | 366 | 858 |
| 143968 | mouse Apoc3 | 367 | 859 |
| 143969 | mouse Apoc3 | 368 | 860 |
| 143970 | mouse Apoc3 | 369 | 861 |
| 143971 | mouse Apoc3 | 370 | 862 |
| 143972 | mouse Apoc3 | 371 | 863 |
| 143973 | mouse Apoc3 | 372 | 864 |
| 143974 | mouse Apoc3 | 373 | 865 |
| 143975 | mouse Apoc3 | 374 | 866 |
| 143976 | mouse Apoc3 | 375 | 867 |
| 143977 | mouse Apoc3 | 376 | 868 |
| 143978 | mouse Apoc3 | 377 | 869 |
| 143979 | mouse Apoc3 | 378 | 870 |
| 143980 | mouse Apoc3 | 379 | 871 |
| 143981 | mouse Apoc3 | 380 | 872 |
| 143982 | mouse Apoc3 | 381 | 873 |
| 143983 | mouse Apoc3 | 382 | 874 |
| 143984 | mouse Apoc3 | 383 | 875 |
| 143985 | mouse Apoc3 | 384 | 876 |
| 143986 | mouse Apoc3 | 385 | 877 |
| 143987 | mouse Apoc3 | 386 | 878 |
| 143988 | mouse Apoc3 | 387 | 879 |
| 143989 | mouse Apoc3 | 388 | 880 |
| 143990 | mouse Apoc3 | 389 | 881 |
| 143991 | mouse Apoc3 | 390 | 882 |
| 143992 | mouse Apoc3 | 391 | 883 |
| 143993 | mouse Apoc3 | 392 | 884 |
| 143994 | mouse Apoc3 | 393 | 885 |
| 143995 | mouse Apoc3 | 394 | 886 |
| 143996 | mouse Apoc3 | 395 | 887 |
| 143997 | mouse Apoc3 | 396 | 888 |
| 143998 | mouse Apoc3 | 397 | 889 |
| 143999 | mouse Apoc3 | 398 | 890 |
| 144000 | mouse Apoc3 | 399 | 891 |
| 144001 | mouse Apoc3 | 400 | 892 |
| 144002 | mouse Apoc3 | 401 | 893 |
| 144003 | mouse Apoc3 | 402 | 894 |
| 144004 | mouse Apoc3 | 403 | 895 |
| 144005 | mouse Apoc3 | 404 | 896 |
| 144006 | mouse Apoc3 | 405 | 897 |
| 144007 | mouse Apoc3 | 406 | 898 |
| 144008 | mouse Apoc3 | 407 | 899 |
| 144009 | mouse Apoc3 | 408 | 900 |
| 144010 | mouse Apoc3 | 409 | 901 |
| 144011 | mouse Apoc3 | 410 | 902 |
| 144012 | mouse Apoc3 | 411 | 903 |
| 144013 | mouse Apoc3 | 412 | 904 |
| 144014 | mouse Apoc3 | 413 | 905 |
| 144015 | mouse Apoc3 | 414 | 906 |
| 144016 | mouse Apoc3 | 415 | 907 |
| 144017 | mouse Apoc3 | 416 | 908 |
| 144018 | mouse Apoc3 | 417 | 909 |
| 144019 | mouse Apoc3 | 418 | 910 |
| 144020 | mouse Apoc3 | 419 | 911 |
| 144021 | mouse Apoc3 | 420 | 912 |
| 144022 | mouse Apoc3 | 421 | 913 |
| 144023 | mouse Apoc3 | 422 | 914 |
| 144024 | mouse Apoc3 | 423 | 915 |
| 144025 | mouse Apoc3 | 424 | 916 |
| 144026 | mouse Apoc3 | 425 | 917 |
| 144027 | mouse Apoc3 | 426 | 918 |
| 144028 | mouse Apoc3 | 42 | 919 |
| 144029 | mouse Apoc3 | 428 | 920 |
| 144030 | mouse Apoc3 | 429 | 921 |
| 144031 | mouse Apoc3 | 430 | 922 |
| 144032 | mouse Apoc3 | 431 | 923 |
| 144033 | mouse Apoc3 | 432 | 924 |
| 144034 | mouse Apoc3 | 433 | 925 |
| 144035 | mouse Apoc3 | 434 | 926 |
| 144036 | mouse Apoc3 | 435 | 927 |
| 144037 | mouse Apoc3 | 436 | 928 |
| 144038 | mouse Apoc3 | 437 | 929 |
| 144039 | mouse Apoc3 | 438 | 930 |
| 144040 | mouse Apoc3 | 439 | 931 |
| 144041 | mouse Apoc3 | 440 | 932 |
| 144042 | mouse Apoc3 | 441 | 933 |
| 144043 | mouse Apoc3 | 442 | 934 |
| 144044 | mouse Apoc3 | 443 | 935 |
| 144045 | mouse Apoc3 | 444 | 936 |
| 144046 | mouse Apoc3 | 445 | 937 |
| 144047 | mouse Apoc3 | 446 | 938 |
| 144048 | mouse Apoc3 | 447 | 939 |
| 144049 | mouse Apoc3 | 448 | 940 |
| 144050 | mouse Apoc3 | 449 | 941 |
| 144051 | mouse Apoc3 | 450 | 942 |
| 144052 | mouse Apoc3 | 451 | 943 |
| 144053 | mouse Apoc3 | 452 | 944 |
| 144054 | mouse Apoc3 | 453 | 945 |
| 144055 | mouse Apoc3 | 454 | 946 |
| 144056 | mouse Apoc3 | 455 | 947 |
| 144057 | mouse Apoc3 | 456 | 948 |
| 144058 | mouse Pcsk9 | 457 | 949 |
| 144059 | mouse Pcsk9 | 458 | 950 |
| 144060 | mouse Pcsk9 | 459 | 951 |
| 144061 | mouse Pcsk9 | 460 | 952 |
| 144062 | mouse Pcsk9 | 461 | 953 |
| 144063 | mouse Pcsk9 | 462 | 954 |
| 144064 | mouse Pcsk9 | 463 | 955 |
| 144065 | mouse Pcsk9 | 464 | 956 |
| 144066 | mouse Pcsk9 | 465 | 957 |
| 144067 | mouse Pcsk9 | 466 | 958 |
| 144068 | mouse Pcsk9 | 467 | 959 |
| 144069 | mouse Pcsk9 | 468 | 960 |
| 144070 | mouse Pcsk9 | 469 | 961 |
| 144071 | mouse Pcsk9 | 470 | 962 |
| 144072 | mouse Pcsk9 | 471 | 963 |
| 144073 | mouse Pcsk9 | 472 | 964 |
| 144074 | mouse Pcsk9 | 473 | 965 |
| 144075 | mouse Pcsk9 | 474 | 966 |
| 144076 | mouse Pcsk9 | 475 | 967 |
| 144077 | mouse Pcsk9 | 476 | 968 |
| 144078 | mouse Pcsk9 | 477 | 969 |
| 144079 | mouse Pcsk9 | 478 | 970 |
| 144080 | mouse Pcsk9 | 479 | 971 |
| 144081 | mouse Pcsk9 | 480 | 972 |
| 144082 | mouse Pcsk9 | 481 | 973 |
| 144083 | mouse Pcsk9 | 482 | 974 |
| 144084 | mouse Pcsk9 | 483 | 975 |
| 144085 | mouse Pcsk9 | 484 | 976 |
| 144086 | mouse Pcsk9 | 485 | 977 |
| 144087 | mouse Pcsk9 | 486 | 978 |
| 144088 | mouse Pcsk9 | 487 | 979 |
| 144089 | mouse Pcsk9 | 488 | 980 |
| 144090 | mouse Pcsk9 | 489 | 981 |
| 144091 | mouse Pcsk9 | 490 | 982 |
| 144092 | mouse Pcsk9 | 491 | 983 |
| 144093 | mouse Pcsk9 | 492 | 984 |
| 144094 | mouse Pcsk9 | 493 | 985 |
| 144095 | mouse Pcsk9 | 494 | 986 |
| 144096 | mouse Pcsk9 | 495 | 987 |
| 144097 | mouse Pcsk9 | 496 | 988 |
| 144098 | mouse Pcsk9 | 497 | 989 |
| 144099 | mouse Pcsk9 | 498 | 990 |
| 144100 | mouse Pcsk9 | 499 | 991 |
| 144101 | mouse Pcsk9 | 500 | 992 |
| 144102 | mouse Pcsk9 | 501 | 993 |
| 144103 | mouse Pcsk9 | 502 | 994 |
| 144104 | mouse Pcsk9 | 503 | 995 |
| 144105 | mouse Pcsk9 | 504 | 996 |
| 144106 | mouse Pcsk9 | 505 | 997 |
| 144107 | mouse Pcsk9 | 506 | 998 |
| 144108 | mouse Pcsk9 | 507 | 999 |
| 144109 | mouse Pcsk9 | 508 | 1000 |
| 144110 | mouse Pcsk9 | 509 | 1001 |
| 144111 | mouse Pcsk9 | 510 | 1002 |
| 144112 | mouse Pcsk9 | 511 | 1003 |
| 144113 | mouse Pcsk9 | 512 | 1004 |
| 144114 | mouse Pcsk9 | 513 | 1005 |
| 144115 | mouse Pcsk9 | 514 | 1006 |
| 144116 | mouse Pcsk9 | 515 | 1007 |
| 144117 | mouse Pcsk9 | 516 | 1008 |
| 144118 | mouse Pcsk9 | 517 | 1009 |
| 144119 | mouse Pcsk9 | 518 | 1010 |
| 144120 | mouse Pcsk9 | 519 | 1011 |
| 144121 | mouse Pcsk9 | 520 | 1012 |
| 144122 | mouse Pcsk9 | 521 | 1013 |
| 144123 | mouse Pcsk9 | 522 | 1014 |
| 144124 | mouse Pcsk9 | 523 | 1015 |
| 144125 | mouse Pcsk9 | 524 | 1016 |
| 144126 | mouse Pcsk9 | 525 | 1017 |
| 144127 | mouse Pcsk9 | 526 | 1018 |
| 144128 | mouse Pcsk9 | 527 | 1019 |
| 144129 | mouse Pcsk9 | 528 | 1020 |

[0319] TABLE 10 provides exemplary spacer sequences and full guide nucleic acid sequences for targeting human APOC3, human PCSK9, human ANGPTL3, mouse Apoc3, and mouse Pcsk9 for CasM.265466 effector protein.

TABLE 10
EXEMPLARY SPACER SEQUENCES AND FULL GUIDE
NUCLEIC ACID SEQUENCES FOR CASM.265466

| | | | gRNA |
|---|---|---|---|
| | | Spacer SEQ | SEQ ID |
| Spacer ID | Target | ID NO: | NO: |
| 133653 | human APOC3 | 1021 | 1976 |
| 133654 | human APOC3 | 1022 | 1977 |
| 133655 | human APOC3 | 1023 | 1978 |
| 133656 | human APOC3 | 1024 | 1979 |
| 133657 | human APOC3 | 1025 | 1980 |
| 133658 | human APOC3 | 1026 | 1981 |
| 133659 | human APOC3 | 1027 | 1982 |
| 133660 | human APOC3 | 1028 | 1983 |
| 133661 | human APOC3 | 1029 | 1984 |
| 133662 | human APOC3 | 1030 | 1985 |
| 133663 | human APOC3 | 1031 | 1986 |
| 133664 | human APOC3 | 1032 | 1987 |
| 133665 | human APOC3 | 1033 | 1988 |
| 133666 | human APOC3 | 1034 | 1989 |
| 133667 | human APOC3 | 1035 | 1990 |
| 133668 | human APOC3 | 1036 | 1991 |
| 133669 | human APOC3 | 1037 | 1992 |
| 133670 | human APOC3 | 1038 | 1993 |
| 133671 | human APOC3 | 1039 | 1994 |
| 133672 | human APOC3 | 1040 | 1995 |
| 133673 | human APOC3 | 1041 | 1996 |
| 133674 | human APOC3 | 1042 | 1997 |
| 133675 | human APOC3 | 1043 | 1998 |
| 133676 | human APOC3 | 1044 | 1999 |
| 133677 | human APOC3 | 1045 | 2000 |
| 133678 | human APOC3 | 1046 | 2001 |
| 133679 | human APOC3 | 1047 | 2002 |
| 133680 | human APOC3 | 1048 | 2003 |
| 133681 | human APOC3 | 1049 | 2004 |
| 133682 | human APOC3 | 1050 | 2005 |
| 133683 | human APOC3 | 1051 | 2006 |
| 133684 | human APOC3 | 1052 | 2007 |
| 133685 | human APOC3 | 1053 | 2008 |
| 133686 | human APOC3 | 1054 | 2009 |
| 133687 | human APOC3 | 1055 | 2010 |
| 133688 | human APOC3 | 1056 | 2011 |
| 133689 | human APOC3 | 1057 | 2012 |
| 133690 | human APOC3 | 1058 | 2013 |
| 133691 | human APOC3 | 1059 | 2014 |
| 133692 | human APOC3 | 1060 | 2015 |
| 133693 | human APOC3 | 1061 | 2016 |
| 133694 | human APOC3 | 1062 | 2017 |
| 133695 | human APOC3 | 1063 | 2018 |
| 133696 | human APOC3 | 1064 | 2019 |
| 133697 | human APOC3 | 1065 | 2020 |
| 133698 | human APOC3 | 1066 | 2021 |
| 133699 | human APOC3 | 1067 | 2022 |
| 133700 | human APOC3 | 1068 | 2023 |
| 133701 | human APOC3 | 1069 | 2024 |
| 133702 | human APOC3 | 1070 | 2025 |
| 133703 | human APOC3 | 1071 | 2026 |
| 133704 | human APOC3 | 1072 | 2027 |
| 133705 | human APOC3 | 1073 | 2028 |
| 133706 | human APOC3 | 1074 | 2029 |
| 133707 | human APOC3 | 1075 | 2030 |
| 133708 | human APOC3 | 1076 | 2031 |
| 133709 | human APOC3 | 1077 | 2032 |
| 133710 | human APOC3 | 1078 | 2033 |
| 133711 | human APOC3 | 1079 | 2034 |
| 133712 | human APOC3 | 1080 | 2035 |
| 133713 | human APOC3 | 1081 | 2036 |
| 133714 | human APOC3 | 1082 | 2037 |
| 133715 | human APOC3 | 1083 | 2038 |
| 133716 | human APOC3 | 1084 | 2039 |
| 133717 | human APOC3 | 1085 | 2040 |
| 133718 | human APOC3 | 1086 | 2041 |
| 133719 | human APOC3 | 1087 | 2042 |
| 133720 | human APOC3 | 1088 | 2043 |
| 133721 | human APOC3 | 1089 | 2044 |
| 133722 | human APOC3 | 1090 | 2045 |
| 133723 | human APOC3 | 1091 | 2046 |
| 133724 | human APOC3 | 1092 | 2047 |
| 133725 | human APOC3 | 1093 | 2048 |
| 133726 | human APOC3 | 1094 | 2049 |
| 133727 | human APOC3 | 1095 | 2050 |
| 133728 | human APOC3 | 1096 | 2051 |
| 133729 | human APOC3 | 1097 | 2052 |
| 133730 | human APOC3 | 1098 | 2053 |
| 133731 | human APOC3 | 1099 | 2054 |
| 133732 | human APOC3 | 1100 | 2055 |
| 133733 | human APOC3 | 1101 | 2056 |
| 133734 | human APOC3 | 1102 | 2057 |
| 133735 | human APOC3 | 1103 | 2058 |
| 133736 | human APOC3 | 1104 | 2059 |
| 133737 | human APOC3 | 1105 | 2060 |
| 133738 | human APOC3 | 1106 | 2061 |
| 133739 | human APOC3 | 1107 | 2062 |
| 133740 | human APOC3 | 1108 | 2063 |
| 133741 | human APOC3 | 1109 | 2064 |
| 133742 | human APOC3 | 1110 | 2065 |
| 133743 | human APOC3 | 1111 | 2066 |
| 133744 | human APOC3 | 1112 | 2067 |
| 133745 | human APOC3 | 1113 | 2068 |
| 133746 | human APOC3 | 1114 | 2069 |
| 133747 | human APOC3 | 1115 | 2070 |
| 133748 | human APOC3 | 1116 | 2071 |
| 133749 | human APOC3 | 1117 | 2072 |
| 133750 | human APOC3 | 1118 | 2073 |
| 133751 | human APOC3 | 1119 | 2074 |
| 133752 | human APOC3 | 1120 | 2075 |
| 133753 | human APOC3 | 1121 | 2076 |
| 133754 | human APOC3 | 1122 | 2077 |
| 133755 | human APOC3 | 1123 | 2078 |
| 133756 | human APOC3 | 1124 | 2079 |
| 133757 | human APOC3 | 1125 | 2080 |
| 133758 | human APOC3 | 1126 | 2081 |
| 133759 | human APOC3 | 1127 | 2082 |
| 133760 | human APOC3 | 1128 | 2083 |
| 133761 | human APOC3 | 1129 | 2084 |
| 133762 | human APOC3 | 1130 | 2085 |
| 133763 | human APOC3 | 1131 | 2086 |
| 133764 | human APOC3 | 1132 | 2087 |
| 133765 | human APOC3 | 1133 | 2088 |
| 133766 | human APOC3 | 1134 | 2089 |
| 133767 | human APOC3 | 1135 | 2090 |
| 133768 | human APOC3 | 1136 | 2091 |
| 133769 | human APOC3 | 1137 | 2092 |
| 133770 | human APOC3 | 1138 | 2093 |
| 133771 | human APOC3 | 1139 | 2094 |
| 133772 | human APOC3 | 1140 | 2095 |
| 133773 | human APOC3 | 1141 | 2096 |
| 133774 | human APOC3 | 1142 | 2097 |
| 133775 | human APOC3 | 1143 | 2098 |
| 133776 | human APOC3 | 1144 | 2099 |
| 133777 | human APOC3 | 1145 | 2100 |
| 133778 | human APOC3 | 1146 | 2101 |
| 133779 | human APOC3 | 1147 | 2102 |
| 133780 | human APOC3 | 1148 | 2103 |
| 133781 | human APOC3 | 1149 | 2104 |
| 133782 | human APOC3 | 1150 | 2105 |
| 133783 | human APOC3 | 1151 | 2106 |
| 133784 | human APOC3 | 1152 | 2107 |
| 133785 | human APOC3 | 1153 | 2108 |
| 133786 | human APOC3 | 1154 | 2109 |
| 133787 | human APOC3 | 1155 | 2110 |
| 133788 | human APOC3 | 1156 | 2111 |
| 133789 | human APOC3 | 1157 | 2112 |
| 133790 | human APOC3 | 1158 | 2113 |
| 133791 | human APOC3 | 1159 | 2114 |
| 133792 | human APOC3 | 1160 | 2115 |
| 133793 | human APOC3 | 1161 | 2116 |
| 133794 | human APOC3 | 1162 | 2117 |
| 133795 | human APOC3 | 1163 | 2118 |
| 133796 | human APOC3 | 1164 | 2119 |
| 133797 | human APOC3 | 1165 | 2120 |
| 133798 | human APOC3 | 1166 | 2121 |
| 133799 | human APOC3 | 1167 | 2122 |
| 133800 | human APOC3 | 1168 | 2123 |
| 133801 | human APOC3 | 1169 | 2124 |
| 133802 | human APOC3 | 1170 | 2125 |
| 133803 | human APOC3 | 1171 | 2126 |
| 133804 | human APOC3 | 1172 | 2127 |
| 133805 | human APOC3 | 1173 | 2128 |
| 133806 | human APOC3 | 1174 | 2129 |
| 133807 | human APOC3 | 1175 | 2130 |
| 133808 | human APOC3 | 1176 | 2131 |
| 133809 | human APOC3 | 1177 | 2132 |
| 133810 | human APOC3 | 1178 | 2133 |
| 133811 | human APOC3 | 1179 | 2134 |
| 133812 | human APOC3 | 1180 | 2135 |
| 133813 | human APOC3 | 1181 | 2136 |
| 133814 | human APOC3 | 1182 | 2137 |
| 133815 | human APOC3 | 1183 | 2138 |
| 133816 | human APOC3 | 1184 | 2139 |
| 133817 | human APOC3 | 1185 | 2140 |
| 133818 | human APOC3 | 1186 | 2141 |
| 133819 | human APOC3 | 1187 | 2142 |
| 133820 | human APOC3 | 1188 | 2143 |
| 133821 | human APOC3 | 1189 | 2144 |
| 133822 | human APOC3 | 1190 | 2145 |
| 133823 | human APOC3 | 1191 | 2146 |
| 133824 | human APOC3 | 1192 | 2147 |
| 133825 | human APOC3 | 1193 | 2148 |
| 133826 | human APOC3 | 1194 | 2149 |
| 133827 | human APOC3 | 1195 | 2150 |
| 133828 | human APOC3 | 1196 | 2151 |
| 133829 | human APOC3 | 1197 | 2152 |
| 133830 | human APOC3 | 1198 | 2153 |
| 133831 | human APOC3 | 1199 | 2154 |
| 133832 | human APOC3 | 1200 | 2155 |
| 133833 | human APOC3 | 1201 | 2156 |
| 133834 | human APOC3 | 1202 | 2157 |
| 133835 | human PCSK9 | 1203 | 2158 |
| 133836 | human PCSK9 | 1204 | 2159 |
| 133837 | human PCSK9 | 1205 | 2160 |
| 133838 | human PCSK9 | 1206 | 2161 |
| 133839 | human PCSK9 | 1207 | 2162 |
| 133840 | human PCSK9 | 1208 | 2163 |
| 133841 | human PCSK9 | 1209 | 2164 |
| 133842 | human PCSK9 | 1210 | 2165 |
| 133843 | human PCSK9 | 1211 | 2166 |
| 133844 | human PCSK9 | 1212 | 2167 |
| 133845 | human PCSK9 | 1213 | 2168 |
| 133846 | human PCSK9 | 1214 | 2169 |
| 133847 | human PCSK9 | 1215 | 2170 |
| 133848 | human PCSK9 | 1216 | 2171 |
| 133849 | human PCSK9 | 1217 | 2172 |
| 133850 | human PCSK9 | 1218 | 2173 |
| 133851 | human PCSK9 | 1219 | 2174 |
| 133852 | human PCSK9 | 1220 | 2175 |
| 133853 | human PCSK9 | 1221 | 2176 |
| 133854 | human PCSK9 | 1222 | 2177 |
| 133855 | human PCSK9 | 1223 | 2178 |
| 133856 | human PCSK9 | 1224 | 2179 |
| 133857 | human PCSK9 | 1225 | 2180 |
| 133858 | human PCSK9 | 1226 | 2181 |
| 133859 | human PCSK9 | 1227 | 2182 |
| 133860 | human PCSK9 | 1228 | 2183 |
| 133861 | human PCSK9 | 1229 | 2184 |
| 133862 | human PCSK9 | 1230 | 2185 |
| 133863 | human PCSK9 | 1231 | 2186 |
| 133864 | human PCSK9 | 1232 | 2187 |
| 133865 | human PCSK9 | 1233 | 2188 |
| 133866 | human PCSK9 | 1234 | 2189 |
| 133867 | human PCSK9 | 1235 | 2190 |
| 133868 | human PCSK9 | 1236 | 2191 |
| 133869 | human PCSK9 | 1237 | 2192 |
| 133870 | human PCSK9 | 1238 | 2193 |
| 133871 | human PCSK9 | 1239 | 2194 |
| 133872 | human PCSK9 | 1240 | 2195 |
| 133873 | human PCSK9 | 1241 | 2196 |
| 133874 | human PCSK9 | 1242 | 2197 |
| 133875 | human PCSK9 | 1243 | 2198 |
| 133876 | human PCSK9 | 1244 | 2199 |
| 133877 | human PCSK9 | 1245 | 2200 |
| 133878 | human PCSK9 | 1246 | 2201 |
| 133879 | human PCSK9 | 1247 | 2202 |
| 133880 | human PCSK9 | 1248 | 2203 |
| 133881 | human PCSK9 | 1249 | 2204 |
| 133882 | human PCSK9 | 1250 | 2205 |
| 133883 | human PCSK9 | 1251 | 2206 |
| 133884 | human PCSK9 | 1252 | 2207 |
| 133885 | human PCSK9 | 1253 | 2208 |
| 133886 | human PCSK9 | 1254 | 2209 |
| 133887 | human PCSK9 | 1255 | 2210 |
| 133888 | human PCSK9 | 1256 | 2211 |
| 133889 | human PCSK9 | 1257 | 2212 |
| 133890 | human PCSK9 | 1258 | 2213 |
| 133891 | human PCSK9 | 1259 | 2214 |
| 133892 | human PCSK9 | 1260 | 2215 |
| 133893 | human PCSK9 | 1261 | 2216 |
| 133894 | human PCSK9 | 1262 | 2217 |
| 133895 | human PCSK9 | 1263 | 2218 |
| 133896 | human PCSK9 | 1264 | 2219 |
| 133897 | human PCSK9 | 1265 | 2220 |
| 133898 | human PCSK9 | 1266 | 2221 |
| 133899 | human PCSK9 | 1267 | 2222 |
| 133900 | human PCSK9 | 1268 | 2223 |
| 133901 | human PCSK9 | 1269 | 2224 |
| 133902 | human PCSK9 | 1270 | 2225 |
| 133903 | human PCSK9 | 1271 | 2226 |
| 133904 | human PCSK9 | 1272 | 2227 |
| 133905 | human PCSK9 | 1273 | 2228 |
| 133906 | human PCSK9 | 1274 | 2229 |
| 133907 | human PCSK9 | 1275 | 2230 |
| 133908 | human PCSK9 | 1276 | 2231 |
| 133909 | human PCSK9 | 1277 | 2232 |
| 133910 | human PCSK9 | 1278 | 2233 |
| 133911 | human PCSK9 | 1279 | 2234 |
| 133912 | human PCSK9 | 1280 | 2235 |
| 133913 | human PCSK9 | 1281 | 2236 |
| 133914 | human PCSK9 | 1282 | 2237 |
| 133915 | human PCSK9 | 1283 | 2238 |
| 133916 | human PCSK9 | 1284 | 2239 |
| 133917 | human PCSK9 | 1285 | 2240 |
| 133918 | human PCSK9 | 1286 | 2241 |
| 133919 | human PCSK9 | 1287 | 2242 |
| 133920 | human PCSK9 | 1288 | 2243 |
| 133921 | human PCSK9 | 1289 | 2244 |
| 133922 | human PCSK9 | 1290 | 2245 |
| 133923 | human PCSK9 | 1291 | 2246 |
| 133924 | human PCSK9 | 1292 | 2247 |
| 133925 | human PCSK9 | 1293 | 2248 |
| 133926 | human PCSK9 | 1294 | 2249 |
| 133927 | human PCSK9 | 1295 | 2250 |
| 133928 | human PCSK9 | 1296 | 2251 |
| 133929 | human PCSK9 | 1297 | 2252 |
| 133930 | human PCSK9 | 1298 | 2253 |
| 133931 | human PCSK9 | 1299 | 2254 |
| 133932 | human PCSK9 | 1300 | 2255 |
| 133933 | human PCSK9 | 1301 | 2256 |
| 133934 | human PCSK9 | 1302 | 2257 |
| 133935 | human PCSK9 | 1303 | 2258 |
| 133936 | human PCSK9 | 1304 | 2259 |
| 133937 | human PCSK9 | 1305 | 2260 |
| 133938 | human PCSK9 | 1306 | 2261 |
| 133939 | human PCSK9 | 1307 | 2262 |
| 133940 | human PCSK9 | 1308 | 2263 |
| 133941 | human PCSK9 | 1309 | 2264 |
| 133942 | human PCSK9 | 1310 | 2265 |
| 133943 | human PCSK9 | 1311 | 2266 |
| 133944 | human PCSK9 | 1312 | 2267 |
| 133945 | human PCSK9 | 1313 | 2268 |
| 133946 | human PCSK9 | 1314 | 2269 |
| 133947 | human PCSK9 | 1315 | 2270 |
| 133948 | human PCSK9 | 1316 | 2271 |
| 133949 | human PCSK9 | 1317 | 2272 |
| 133950 | human PCSK9 | 1318 | 2273 |
| 133951 | human PCSK9 | 1319 | 2274 |
| 133952 | human PCSK9 | 1320 | 2275 |
| 133953 | human PCSK9 | 1321 | 2276 |
| 133954 | human PCSK9 | 1322 | 2277 |
| 133955 | human PCSK9 | 1323 | 2278 |
| 133956 | human PCSK9 | 1324 | 2279 |
| 133957 | human PCSK9 | 1325 | 2280 |
| 133958 | human PCSK9 | 1326 | 2281 |
| 133959 | human PCSK9 | 1327 | 2282 |
| 133960 | human PCSK9 | 1328 | 2283 |
| 133961 | human PCSK9 | 1329 | 2284 |
| 133962 | human PCSK9 | 1330 | 2285 |
| 133963 | human PCSK9 | 1331 | 2286 |
| 133964 | human PCSK9 | 1332 | 2287 |
| 133965 | human PCSK9 | 1333 | 2288 |
| 133966 | human PCSK9 | 1334 | 2289 |
| 133967 | human PCSK9 | 1335 | 2290 |
| 133968 | human PCSK9 | 1336 | 2291 |
| 133969 | human PCSK9 | 1337 | 2292 |
| 133970 | human PCSK9 | 1338 | 2293 |
| 133971 | human PCSK9 | 1339 | 2294 |
| 133972 | human PCSK9 | 1340 | 2295 |
| 133973 | human PCSK9 | 1341 | 2296 |
| 133974 | human PCSK9 | 1342 | 2297 |
| 133975 | human PCSK9 | 1343 | 2298 |
| 133976 | human PCSK9 | 1344 | 2299 |
| 133977 | human PCSK9 | 1345 | 2300 |
| 133978 | human PCSK9 | 1346 | 2301 |
| 133979 | human PCSK9 | 1347 | 2302 |
| 133980 | human PCSK9 | 1348 | 2303 |
| 133981 | human PCSK9 | 1349 | 2304 |
| 133982 | human PCSK9 | 1350 | 2305 |
| 133983 | human PCSK9 | 1351 | 2306 |
| 133984 | human PCSK9 | 1352 | 2307 |
| 133985 | human PCSK9 | 1353 | 2308 |
| 133986 | human PCSK9 | 1354 | 2309 |
| 133987 | human PCSK9 | 1355 | 2310 |
| 133988 | human PCSK9 | 1356 | 2311 |
| 133989 | human PCSK9 | 1357 | 2312 |
| 133990 | human PCSK9 | 1358 | 2313 |
| 133991 | human PCSK9 | 1359 | 2314 |
| 133992 | human PCSK9 | 1360 | 2315 |
| 133993 | human PCSK9 | 1361 | 2316 |
| 133994 | human ANGPTL3 | 1362 | 2317 |
| 133995 | human ANGPTL3 | 1363 | 2318 |
| 133996 | human ANGPTL3 | 1364 | 2319 |
| 133997 | human ANGPTL3 | 1365 | 2320 |
| 133998 | human ANGPTL3 | 1366 | 2321 |
| 133999 | human ANGPTL3 | 1367 | 2322 |
| 134000 | human ANGPTL3 | 1368 | 2323 |
| 134001 | human ANGPTL3 | 1369 | 2324 |
| 134002 | human ANGPTL3 | 1370 | 2325 |
| 134003 | human ANGPTL3 | 1371 | 2326 |
| 134004 | human ANGPTL3 | 1372 | 2327 |
| 134005 | human ANGPTL3 | 1373 | 2328 |
| 134006 | human ANGPTL3 | 1374 | 2329 |
| 134007 | human ANGPTL3 | 1375 | 2330 |
| 134008 | human ANGPTL3 | 1376 | 2331 |
| 134009 | human ANGPTL3 | 1377 | 2332 |
| 134010 | human ANGPTL3 | 1378 | 2333 |
| 134011 | human ANGPTL3 | 1379 | 2334 |
| 134012 | human ANGPTL3 | 1380 | 2335 |
| 134013 | human ANGPTL3 | 1381 | 2336 |
| 134014 | human ANGPTL3 | 1382 | 2337 |
| 134015 | human ANGPTL3 | 1383 | 2338 |
| 134016 | human ANGPTL3 | 1384 | 2339 |
| 134017 | human ANGPTL3 | 1385 | 2340 |
| 134018 | human ANGPTL3 | 1386 | 2341 |
| 134019 | human ANGPTL3 | 1387 | 2342 |
| 134020 | human ANGPTL3 | 1388 | 2343 |
| 134021 | human ANGPTL3 | 1389 | 2344 |
| 134022 | human ANGPTL3 | 1390 | 2345 |
| 134023 | human ANGPTL3 | 1391 | 2346 |
| 134024 | human ANGPTL3 | 1392 | 2347 |
| 134025 | human ANGPTL3 | 1393 | 2348 |
| 134026 | human ANGPTL3 | 1394 | 2349 |
| 134027 | human ANGPTL3 | 1395 | 2350 |
| 134028 | human ANGPTL3 | 1396 | 2351 |
| 134029 | human ANGPTL3 | 1397 | 2352 |
| 134030 | human ANGPTL3 | 1398 | 2353 |
| 134031 | human ANGPTL3 | 1399 | 2354 |
| 134032 | human ANGPTL3 | 1400 | 2355 |
| 134033 | human ANGPTL3 | 1401 | 2356 |
| 134034 | human ANGPTL3 | 1402 | 2357 |
| 134035 | human ANGPTL3 | 1403 | 2358 |
| 134036 | human ANGPTL3 | 1404 | 2359 |
| 134037 | human ANGPTL3 | 1405 | 2360 |
| 134038 | human ANGPTL3 | 1406 | 2361 |
| 134039 | human ANGPTL3 | 1407 | 2362 |
| 134040 | human ANGPTL3 | 1408 | 2363 |
| 134041 | human ANGPTL3 | 1409 | 2364 |
| 134042 | human ANGPTL3 | 1410 | 2365 |
| 134043 | human ANGPTL3 | 1411 | 2366 |
| 134044 | human ANGPTL3 | 1412 | 2367 |
| 134045 | human ANGPTL3 | 1413 | 2368 |
| 134046 | human ANGPTL3 | 1414 | 2369 |
| 134047 | human ANGPTL3 | 1415 | 2370 |
| 134048 | human ANGPTL3 | 1416 | 2371 |
| 134049 | human ANGPTL3 | 1417 | 2372 |
| 134050 | human ANGPTL3 | 1418 | 2373 |
| 134051 | human ANGPTL3 | 1419 | 2374 |
| 134052 | human ANGPTL3 | 1420 | 2375 |
| 134053 | human ANGPTL3 | 1421 | 2376 |
| 134054 | human ANGPTL3 | 1422 | 2377 |
| 134055 | human ANGPTL3 | 1423 | 2378 |
| 134056 | human ANGPTL3 | 1424 | 2379 |
| 134057 | human ANGPTL3 | 1425 | 2380 |
| 134058 | human ANGPTL3 | 1426 | 2381 |
| 134059 | human ANGPTL3 | 1427 | 2382 |
| 134060 | human ANGPTL3 | 1428 | 2383 |
| 134061 | human ANGPTL3 | 1429 | 2384 |
| 134062 | human ANGPTL3 | 1430 | 2385 |
| 134063 | human ANGPTL3 | 1431 | 2386 |
| 134064 | human ANGPTL3 | 1432 | 2387 |
| 134065 | human ANGPTL3 | 1433 | 2388 |
| 134066 | human ANGPTL3 | 1434 | 2389 |
| 134067 | human ANGPTL3 | 1435 | 2390 |
| 134068 | human ANGPTL3 | 1436 | 2391 |
| 134069 | human ANGPTL3 | 1437 | 2392 |
| 134070 | human ANGPTL3 | 1438 | 2393 |
| 134071 | human ANGPTL3 | 1439 | 2394 |
| 134072 | human ANGPTL3 | 1440 | 2395 |
| 134073 | human ANGPTL3 | 1441 | 2396 |
| 134074 | human ANGPTL3 | 1442 | 2397 |
| 134075 | human ANGPTL3 | 1443 | 2398 |
| 134076 | human ANGPTL3 | 1444 | 2399 |
| 134077 | human ANGPTL3 | 1445 | 2400 |
| 134078 | human ANGPTL3 | 1446 | 2401 |
| 134079 | human ANGPTL3 | 1447 | 2402 |
| 134080 | human ANGPTL3 | 1448 | 2403 |
| 134081 | human ANGPTL3 | 1449 | 2404 |
| 134082 | human ANGPTL3 | 1450 | 2405 |
| 134083 | human ANGPTL3 | 1451 | 2406 |
| 134084 | human ANGPTL3 | 1452 | 2407 |
| 134085 | human ANGPTL3 | 1453 | 2408 |
| 134086 | human ANGPTL3 | 1454 | 2409 |
| 134087 | human ANGPTL3 | 1455 | 2410 |
| 134088 | human ANGPTL3 | 1456 | 2411 |
| 134089 | human ANGPTL3 | 1457 | 2412 |
| 134090 | human ANGPTL3 | 1458 | 2413 |
| 134091 | human ANGPTL3 | 1459 | 2414 |
| 134092 | human ANGPTL3 | 1460 | 2415 |
| 134093 | human ANGPTL3 | 1461 | 2416 |
| 134094 | human ANGPTL3 | 1462 | 2417 |
| 134095 | human ANGPTL3 | 1463 | 2418 |
| 134096 | human ANGPTL3 | 1464 | 2419 |
| 134097 | human ANGPTL3 | 1465 | 2420 |
| 134098 | human ANGPTL3 | 1466 | 2421 |
| 134099 | human ANGPTL3 | 1467 | 2422 |
| 134100 | human ANGPTL3 | 1468 | 2423 |
| 134101 | human ANGPTL3 | 1469 | 2424 |
| 134102 | human ANGPTL3 | 1470 | 2425 |
| 134103 | human ANGPTL3 | 1471 | 2426 |
| 134104 | human ANGPTL3 | 1472 | 2427 |
| 134105 | human ANGPTL3 | 1473 | 2428 |
| 134106 | human ANGPTL3 | 1474 | 2429 |
| 134107 | human ANGPTL3 | 1475 | 2430 |
| 134108 | human ANGPTL3 | 1476 | 2431 |
| 134109 | human ANGPTL3 | 1477 | 2432 |
| 134110 | human ANGPTL3 | 1478 | 2433 |
| 134111 | human ANGPTL3 | 1479 | 2434 |
| 134112 | human ANGPTL3 | 1480 | 2435 |
| 134113 | human ANGPTL3 | 1481 | 2436 |
| 134114 | human ANGPTL3 | 1482 | 2437 |
| 134115 | human ANGPTL3 | 1483 | 2438 |
| 134116 | human ANGPTL3 | 1484 | 2439 |
| 134117 | human ANGPTL3 | 1485 | 2440 |
| 134118 | human ANGPTL3 | 1486 | 2441 |
| 134119 | human ANGPTL3 | 1487 | 2442 |
| 134120 | human ANGPTL3 | 1488 | 2443 |
| 134121 | human ANGPTL3 | 1489 | 2444 |
| 134122 | human ANGPTL3 | 1490 | 2445 |
| 134123 | human ANGPTL3 | 1491 | 2446 |
| 134124 | human ANGPTL3 | 1492 | 2447 |
| 134125 | human ANGPTL3 | 1493 | 2448 |
| 134126 | human ANGPTL3 | 1494 | 2449 |
| 134127 | human ANGPTL3 | 1495 | 2450 |
| 134128 | human ANGPTL3 | 1496 | 2451 |
| 134129 | human ANGPTL3 | 1497 | 2452 |
| 134130 | human ANGPTL3 | 1498 | 2453 |
| 134131 | human ANGPTL3 | 1499 | 2454 |
| 134132 | human ANGPTL3 | 1500 | 2455 |
| 134133 | human ANGPTL3 | 1501 | 2456 |
| 134134 | human ANGPTL3 | 1502 | 2457 |
| 134135 | human ANGPTL3 | 1503 | 2458 |
| 134136 | human ANGPTL3 | 1504 | 2459 |
| 134137 | human ANGPTL3 | 1505 | 2460 |
| 134138 | human ANGPTL3 | 1506 | 2461 |
| 134139 | human ANGPTL3 | 1507 | 2462 |
| 134140 | human ANGPTL3 | 1508 | 2463 |
| 134141 | human ANGPTL3 | 1509 | 2464 |
| 134142 | human ANGPTL3 | 1510 | 2465 |
| 134143 | human ANGPTL3 | 1511 | 2466 |
| 134144 | human ANGPTL3 | 1512 | 2467 |
| 134145 | human ANGPTL3 | 1513 | 2468 |
| 134146 | human ANGPTL3 | 1514 | 2469 |
| 134147 | human ANGPTL3 | 1515 | 2470 |
| 134148 | human ANGPTL3 | 1516 | 2471 |
| 134149 | human ANGPTL3 | 1517 | 2472 |
| 134150 | human ANGPTL3 | 1518 | 2473 |
| 134151 | human ANGPTL3 | 1519 | 2474 |
| 134152 | human ANGPTL3 | 1520 | 2475 |
| 134153 | human ANGPTL3 | 1521 | 2476 |
| 134154 | human ANGPTL3 | 1522 | 2477 |
| 134155 | human ANGPTL3 | 1523 | 2478 |
| 134156 | human ANGPTL3 | 1524 | 2479 |
| 134157 | human ANGPTL3 | 1525 | 2480 |
| 134158 | human ANGPTL3 | 1526 | 2481 |
| 134159 | human ANGPTL3 | 1527 | 2482 |
| 134160 | human ANGPTL3 | 1528 | 2483 |
| 134161 | human ANGPTL3 | 1529 | 2484 |
| 134162 | human ANGPTL3 | 1530 | 2485 |
| 134163 | human ANGPTL3 | 1531 | 2486 |
| 134164 | human ANGPTL3 | 1532 | 2487 |
| 134165 | human ANGPTL3 | 1533 | 2488 |
| 134166 | human ANGPTL3 | 1534 | 2489 |
| 134167 | human ANGPTL3 | 1535 | 2490 |
| 134168 | human ANGPTL3 | 1536 | 2491 |
| 134169 | human ANGPTL3 | 1537 | 2492 |
| 134170 | human ANGPTL3 | 1538 | 2493 |
| 134171 | human ANGPTL3 | 1539 | 2494 |
| 134172 | human ANGPTL3 | 1540 | 2495 |
| 134173 | human ANGPTL3 | 1541 | 2496 |
| 134174 | human ANGPTL3 | 1542 | 2497 |
| 134175 | human ANGPTL3 | 1543 | 2498 |
| 134176 | human ANGPTL3 | 1544 | 2499 |
| 134177 | human ANGPTL3 | 1545 | 2500 |
| 134178 | human ANGPTL3 | 1546 | 2501 |
| 134179 | human ANGPTL3 | 1547 | 2502 |
| 134180 | human ANGPTL3 | 1548 | 2503 |
| 134181 | human ANGPTL3 | 1549 | 2504 |
| 134182 | human ANGPTL3 | 1550 | 2505 |
| 134183 | human ANGPTL3 | 1551 | 2506 |
| 134184 | human ANGPTL3 | 1552 | 2507 |
| 134185 | human ANGPTL3 | 1553 | 2508 |
| 134186 | human ANGPTL3 | 1554 | 2509 |
| 134187 | human ANGPTL3 | 1555 | 2510 |
| 134188 | human ANGPTL3 | 1556 | 2511 |
| 134189 | human ANGPTL3 | 1557 | 2512 |
| 134190 | human ANGPTL3 | 1558 | 2513 |
| 134191 | human ANGPTL3 | 1559 | 2514 |
| 134192 | human ANGPTL3 | 1560 | 2515 |
| 134193 | human ANGPTL3 | 1561 | 2516 |
| 134194 | human ANGPTL3 | 1562 | 2517 |
| 134195 | human ANGPTL3 | 1563 | 2518 |
| 134196 | human ANGPTL3 | 1564 | 2519 |
| 134197 | human ANGPTL3 | 1565 | 2520 |
| 134198 | human ANGPTL3 | 1566 | 2521 |
| 134199 | human ANGPTL3 | 1567 | 2522 |
| 134200 | human ANGPTL3 | 1568 | 2523 |
| 134201 | human ANGPTL3 | 1569 | 2524 |
| 134202 | human ANGPTL3 | 1570 | 2525 |
| 134203 | human ANGPTL3 | 1571 | 2526 |
| 134204 | human ANGPTL3 | 1572 | 2527 |
| 134205 | human ANGPTL3 | 1573 | 2528 |
| 134206 | human ANGPTL3 | 1574 | 2529 |
| 134207 | human ANGPTL3 | 1575 | 2530 |
| 134208 | human ANGPTL3 | 1576 | 2531 |
| 134209 | human ANGPTL3 | 1577 | 2532 |
| 134210 | human ANGPTL3 | 1578 | 2533 |
| 134211 | human ANGPTL3 | 1579 | 2534 |
| 134212 | human ANGPTL3 | 1580 | 2535 |
| 134213 | human ANGPTL3 | 1581 | 2536 |
| 134214 | human ANGPTL3 | 1582 | 2537 |
| 144542 | mouse Apoc3 | 1583 | 2538 |
| 144543 | mouse Apoc3 | 1584 | 2539 |
| 144544 | mouse Apoc3 | 1585 | 2540 |
| 144545 | mouse Apoc3 | 1586 | 2541 |
| 144546 | mouse Apoc3 | 1587 | 2542 |
| 144547 | mouse Apoc3 | 1588 | 2543 |
| 144548 | mouse Apoc3 | 1589 | 2544 |
| 144549 | mouse Apoc3 | 1590 | 2545 |
| 144550 | mouse Apoc3 | 1591 | 2546 |
| 144551 | mouse Apoc3 | 1592 | 2547 |
| 144552 | mouse Apoc3 | 1593 | 2548 |
| 144553 | mouse Apoc3 | 1594 | 2549 |
| 144554 | mouse Apoc3 | 1595 | 2550 |
| 144555 | mouse Apoc3 | 1596 | 2551 |
| 144556 | mouse Apoc3 | 1597 | 2552 |
| 144557 | mouse Apoc3 | 1598 | 2553 |
| 144558 | mouse Apoc3 | 1599 | 2554 |
| 144559 | mouse Apoc3 | 1600 | 2555 |
| 144560 | mouse Apoc3 | 1601 | 2556 |
| 144561 | mouse Apoc3 | 1602 | 2557 |
| 144562 | mouse Apoc3 | 1603 | 2558 |
| 144563 | mouse Apoc3 | 1604 | 2559 |
| 144564 | mouse Apoc3 | 1605 | 2560 |
| 144565 | mouse Apoc3 | 1606 | 2561 |
| 144566 | mouse Apoc3 | 1607 | 2562 |
| 144567 | mouse Apoc3 | 1608 | 2563 |
| 144568 | mouse Apoc3 | 1609 | 2564 |
| 144569 | mouse Apoc3 | 1610 | 2565 |
| 144570 | mouse Apoc3 | 1611 | 2566 |
| 144571 | mouse Apoc3 | 1612 | 2567 |
| 144572 | mouse Apoc3 | 1613 | 2568 |
| 144573 | mouse Apoc3 | 1614 | 2569 |
| 144574 | mouse Apoc3 | 1615 | 2570 |
| 144575 | mouse Apoc3 | 1616 | 2571 |
| 144576 | mouse Apoc3 | 1617 | 2572 |
| 144577 | mouse Apoc3 | 1618 | 2573 |
| 144578 | mouse Apoc3 | 1619 | 2574 |
| 144579 | mouse Apoc3 | 1620 | 2575 |
| 144580 | mouse Apoc3 | 1621 | 2576 |
| 144581 | mouse Apoc3 | 1622 | 2577 |
| 144582 | mouse Apoc3 | 1623 | 2578 |
| 144583 | mouse Apoc3 | 1624 | 2579 |
| 144584 | mouse Apoc3 | 1625 | 2580 |
| 144585 | mouse Apoc3 | 1626 | 2581 |
| 144586 | mouse Apoc3 | 1627 | 2582 |
| 144587 | mouse Apoc3 | 1628 | 2583 |
| 144588 | mouse Apoc3 | 1629 | 2584 |
| 144589 | mouse Apoc3 | 1630 | 2585 |
| 144590 | mouse Apoc3 | 1631 | 2586 |
| 144591 | mouse Apoc3 | 1632 | 2587 |
| 144592 | mouse Apoc3 | 1633 | 2588 |
| 144593 | mouse Apoc3 | 1634 | 2589 |
| 144594 | mouse Apoc3 | 1635 | 2590 |
| 144595 | mouse Apoc3 | 1636 | 2591 |
| 144596 | mouse Apoc3 | 1637 | 2592 |
| 144597 | mouse Apoc3 | 1638 | 2593 |
| 144598 | mouse Apoc3 | 1639 | 2594 |
| 144599 | mouse Apoc3 | 1640 | 2595 |
| 144600 | mouse Apoc3 | 1641 | 2596 |
| 144601 | mouse Apoc3 | 1642 | 2597 |
| 144602 | mouse Apoc3 | 1643 | 2598 |
| 144603 | mouse Apoc3 | 1644 | 2599 |
| 144604 | mouse Apoc3 | 1645 | 2600 |
| 144605 | mouse Apoc3 | 1646 | 2601 |
| 144606 | mouse Apoc3 | 1647 | 2602 |
| 144607 | mouse Apoc3 | 1648 | 2603 |
| 144608 | mouse Apoc3 | 1649 | 2604 |
| 144609 | mouse Apoc3 | 1650 | 2605 |
| 144610 | mouse Apoc3 | 1651 | 2606 |
| 144611 | mouse Apoc3 | 1652 | 2607 |
| 144612 | mouse Apoc3 | 1653 | 2608 |
| 144613 | mouse Apoc3 | 1654 | 2609 |
| 144614 | mouse Apoc3 | 1655 | 2610 |
| 144615 | mouse Apoc3 | 1656 | 2611 |
| 144616 | mouse Apoc3 | 1657 | 2612 |
| 144617 | mouse Apoc3 | 1658 | 2613 |
| 144618 | mouse Apoc3 | 1659 | 2614 |
| 144619 | mouse Apoc3 | 1660 | 2615 |
| 144620 | mouse Apoc3 | 1661 | 2616 |
| 144621 | mouse Apoc3 | 1662 | 2617 |
| 144622 | mouse Apoc3 | 1663 | 2618 |
| 144623 | mouse Apoc3 | 1664 | 2619 |
| 144624 | mouse Apoc3 | 1665 | 2620 |
| 144625 | mouse Apoc3 | 1666 | 2621 |
| 144626 | mouse Apoc3 | 1667 | 2622 |
| 144627 | mouse Apoc3 | 1668 | 2623 |
| 144628 | mouse Apoc3 | 1669 | 2624 |
| 144629 | mouse Apoc3 | 1670 | 2625 |
| 144630 | mouse Apoc3 | 1671 | 2626 |
| 144631 | mouse Apoc3 | 1672 | 2627 |
| 144632 | mouse Apoc3 | 1673 | 2628 |
| 144633 | mouse Apoc3 | 1674 | 2629 |
| 144634 | mouse Apoc3 | 1675 | 2630 |
| 144635 | mouse Apoc3 | 1676 | 2631 |
| 144636 | mouse Apoc3 | 1677 | 2632 |
| 144637 | mouse Apoc3 | 1678 | 2633 |
| 144638 | mouse Apoc3 | 1679 | 2634 |
| 144639 | mouse Apoc3 | 1680 | 2635 |
| 144640 | mouse Apoc3 | 1681 | 2636 |
| 144641 | mouse Apoc3 | 1682 | 2637 |
| 144642 | mouse Apoc3 | 1683 | 2638 |
| 144643 | mouse Apoc3 | 1684 | 2639 |
| 144644 | mouse Apoc3 | 1685 | 2640 |
| 144645 | mouse Apoc3 | 1686 | 2641 |
| 144646 | mouse Apoc3 | 1687 | 2642 |
| 144647 | mouse Apoc3 | 1688 | 2643 |
| 144648 | mouse Apoc3 | 1689 | 2644 |
| 144649 | mouse Apoc3 | 1690 | 2645 |
| 144650 | mouse Apoc3 | 1691 | 2646 |
| 144651 | mouse Apoc3 | 1692 | 2647 |
| 144652 | mouse Apoc3 | 1693 | 2648 |
| 144653 | mouse Apoc3 | 1694 | 2649 |
| 144654 | mouse Apoc3 | 1695 | 2650 |
| 144655 | mouse Apoc3 | 1696 | 2651 |
| 144656 | mouse Apoc3 | 1697 | 2652 |
| 144657 | mouse Apoc3 | 1698 | 2653 |
| 144658 | mouse Apoc3 | 1699 | 2654 |
| 144659 | mouse Apoc3 | 1700 | 2655 |
| 144660 | mouse Apoc3 | 1701 | 2656 |
| 144661 | mouse Apoc3 | 1702 | 2657 |
| 144662 | mouse Apoc3 | 1703 | 2658 |
| 144663 | mouse Apoc3 | 1704 | 2659 |
| 144664 | mouse Apoc3 | 1705 | 2660 |
| 144665 | mouse Apoc3 | 1706 | 2661 |
| 144666 | mouse Apoc3 | 1707 | 2662 |
| 144667 | mouse Apoc3 | 1708 | 2663 |
| 144668 | mouse Apoc3 | 1709 | 2664 |
| 144669 | mouse Apoc3 | 1710 | 2665 |
| 144670 | mouse Apoc3 | 1711 | 2666 |
| 144671 | mouse Apoc3 | 1712 | 2667 |
| 144672 | mouse Apoc3 | 1713 | 2668 |
| 144673 | mouse Apoc3 | 1714 | 2669 |
| 144674 | mouse Apoc3 | 1715 | 2670 |
| 144675 | mouse Apoc3 | 1716 | 2671 |
| 144676 | mouse Apoc3 | 1717 | 2672 |
| 144677 | mouse Apoc3 | 1718 | 2673 |
| 144678 | mouse Apoc3 | 1719 | 2674 |
| 144679 | mouse Apoc3 | 1720 | 2675 |
| 144680 | mouse Apoc3 | 1721 | 2676 |
| 144681 | mouse Apoc3 | 1722 | 2677 |
| 144682 | mouse Apoc3 | 1723 | 2678 |
| 144683 | mouse Apoc3 | 1724 | 2679 |
| 144684 | mouse Apoc3 | 1725 | 2680 |
| 144685 | mouse Apoc3 | 1726 | 2681 |
| 144686 | mouse Apoc3 | 1727 | 2682 |
| 144687 | mouse Apoc3 | 1728 | 2683 |
| 144688 | mouse Apoc3 | 1729 | 2684 |
| 144689 | mouse Apoc3 | 1730 | 2685 |
| 144690 | mouse Apoc3 | 1731 | 2686 |
| 144691 | mouse Apoc3 | 1732 | 2687 |
| 144692 | mouse Apoc3 | 1733 | 2688 |
| 144693 | mouse Apoc3 | 1734 | 2689 |
| 144694 | mouse Apoc3 | 1735 | 2690 |
| 144695 | mouse Apoc3 | 1736 | 2691 |
| 144696 | mouse Apoc3 | 1737 | 2692 |
| 144697 | mouse Apoc3 | 1738 | 2693 |
| 144698 | mouse Apoc3 | 1739 | 2694 |
| 144699 | mouse Apoc3 | 1740 | 2695 |
| 144700 | mouse Apoc3 | 1741 | 2696 |
| 144701 | mouse Apoc3 | 1742 | 2697 |
| 144702 | mouse Apoc3 | 1743 | 2698 |
| 144703 | mouse Apoc3 | 1744 | 2699 |
| 144704 | mouse Apoc3 | 1745 | 2700 |
| 144705 | mouse Apoc3 | 1746 | 2701 |
| 144706 | mouse Apoc3 | 1747 | 2702 |
| 144707 | mouse Apoc3 | 1748 | 2703 |
| 144708 | mouse Apoc3 | 1749 | 2704 |
| 144709 | mouse Apoc3 | 1750 | 2705 |
| 144710 | mouse Apoc3 | 1751 | 2706 |
| 144711 | mouse Apoc3 | 1752 | 2707 |
| 144712 | mouse Apoc3 | 1753 | 2708 |
| 144713 | mouse Apoc3 | 1754 | 2709 |
| 144714 | mouse Apoc3 | 1755 | 2710 |
| 144715 | mouse Apoc3 | 1756 | 2711 |
| 144716 | mouse Apoc3 | 1757 | 2712 |
| 144717 | mouse Apoc3 | 1758 | 2713 |
| 144718 | mouse Apoc3 | 1759 | 2714 |
| 144719 | mouse Apoc3 | 1760 | 2715 |
| 144720 | mouse Apoc3 | 1761 | 2716 |
| 144721 | mouse Apoc3 | 1762 | 2717 |
| 144722 | mouse Apoc3 | 1763 | 2718 |
| 144723 | mouse Apoc3 | 1764 | 2719 |
| 144724 | mouse Apoc3 | 1765 | 2720 |
| 144725 | mouse Apoc3 | 1766 | 2721 |
| 144726 | mouse Apoc3 | 1767 | 2722 |
| 144727 | mouse Apoc3 | 1768 | 2723 |
| 144728 | mouse Apoc3 | 1769 | 2724 |
| 144729 | mouse Apoc3 | 1770 | 2725 |
| 144730 | mouse Apoc3 | 1771 | 2726 |
| 144731 | mouse Apoc3 | 1772 | 2727 |
| 144732 | mouse Apoc3 | 1773 | 2728 |
| 144733 | mouse Apoc3 | 1774 | 2729 |
| 144734 | mouse Apoc3 | 1775 | 2730 |
| 144735 | mouse Apoc3 | 1776 | 2731 |
| 144736 | mouse Apoc3 | 1777 | 2732 |
| 144737 | mouse Apoc3 | 1778 | 2733 |
| 144738 | mouse Apoc3 | 1779 | 2734 |
| 144739 | mouse Apoc3 | 1780 | 2735 |
| 144740 | mouse Apoc3 | 1781 | 2736 |
| 144741 | mouse Apoc3 | 1782 | 2737 |
| 144742 | mouse Apoc3 | 1783 | 2738 |
| 144743 | mouse Apoc3 | 1784 | 2739 |
| 144744 | mouse Apoc3 | 1785 | 2740 |
| 144745 | mouse Apoc3 | 1786 | 2741 |
| 144746 | mouse Apoc3 | 1787 | 2742 |
| 144747 | mouse Apoc3 | 1788 | 2743 |
| 144748 | mouse Apoc3 | 1789 | 2744 |
| 144749 | mouse Apoc3 | 1790 | 2745 |
| 144750 | mouse Apoc3 | 1791 | 2746 |
| 144751 | mouse Apoc3 | 1792 | 2747 |
| 144752 | mouse Apoc3 | 1793 | 2748 |
| 144753 | mouse Apoc3 | 1794 | 2749 |
| 144754 | mouse Apoc3 | 1795 | 2750 |
| 144755 | mouse Apoc3 | 1796 | 2751 |
| 144756 | mouse Apoc3 | 1797 | 2752 |
| 144757 | mouse Apoc3 | 1798 | 2753 |
| 144758 | mouse Apoc3 | 1799 | 2754 |
| 144759 | mouse Apoc3 | 1800 | 2755 |
| 144760 | mouse Pcsk9 | 1801 | 2756 |
| 144761 | mouse Pcsk9 | 1802 | 2757 |
| 144762 | mouse Pcsk9 | 1803 | 2758 |
| 144763 | mouse Pcsk9 | 1804 | 2759 |
| 144764 | mouse Pcsk9 | 1805 | 2760 |
| 144765 | mouse Pcsk9 | 1806 | 2761 |
| 144766 | mouse Pcsk9 | 1807 | 2762 |
| 144767 | mouse Pcsk9 | 1808 | 2763 |
| 144768 | mouse Pcsk9 | 1809 | 2764 |
| 144769 | mouse Pcsk9 | 1810 | 2765 |
| 144770 | mouse Pcsk9 | 1811 | 2766 |
| 144771 | mouse Pcsk9 | 1812 | 2767 |
| 144772 | mouse Pcsk9 | 1813 | 2768 |
| 144773 | mouse Pcsk9 | 1814 | 2769 |
| 144774 | mouse Pcsk9 | 1815 | 2770 |
| 144775 | mouse Pcsk9 | 1816 | 2771 |
| 144776 | mouse Pcsk9 | 1817 | 2772 |
| 144777 | mouse Pcsk9 | 1818 | 2773 |
| 144778 | mouse Pcsk9 | 1819 | 2774 |
| 144779 | mouse Pcsk9 | 1820 | 2775 |
| 144780 | mouse Pcsk9 | 1821 | 2776 |
| 144781 | mouse Pcsk9 | 1822 | 2777 |
| 144782 | mouse Pcsk9 | 1823 | 2778 |
| 144783 | mouse Pcsk9 | 1824 | 2779 |
| 144784 | mouse Pcsk9 | 1825 | 2780 |
| 144785 | mouse Pcsk9 | 1826 | 2781 |
| 144786 | mouse Pcsk9 | 1827 | 2782 |
| 144787 | mouse Pcsk9 | 1828 | 2783 |
| 144788 | mouse Pcsk9 | 1829 | 2784 |
| 144789 | mouse Pcsk9 | 1830 | 2785 |
| 144790 | mouse Pcsk9 | 1831 | 2786 |
| 144791 | mouse Pcsk9 | 1832 | 2787 |
| 144792 | mouse Pcsk9 | 1833 | 2788 |
| 144793 | mouse Pcsk9 | 1834 | 2789 |
| 144794 | mouse Pcsk9 | 1835 | 2790 |
| 144795 | mouse Pcsk9 | 1836 | 2791 |
| 144796 | mouse Pcsk9 | 1837 | 2792 |
| 144797 | mouse Pcsk9 | 1838 | 2793 |
| 144798 | mouse Pcsk9 | 1839 | 2794 |
| 144799 | mouse Pcsk9 | 1840 | 2795 |
| 144800 | mouse Pcsk9 | 1841 | 2796 |
| 144801 | mouse Pcsk9 | 1842 | 2797 |
| 144802 | mouse Pcsk9 | 1843 | 2798 |
| 144803 | mouse Pcsk9 | 1844 | 2799 |
| 144804 | mouse Pcsk9 | 1845 | 2800 |
| 144805 | mouse Pcsk9 | 1846 | 2801 |
| 144806 | mouse Pcsk9 | 1847 | 2802 |
| 144807 | mouse Pcsk9 | 1848 | 2803 |
| 144808 | mouse Pcsk9 | 1849 | 2804 |
| 144809 | mouse Pcsk9 | 1850 | 2805 |
| 144810 | mouse Pcsk9 | 1851 | 2806 |
| 144811 | mouse Pcsk9 | 1852 | 2807 |
| 144812 | mouse Pcsk9 | 1853 | 2808 |
| 144813 | mouse Pcsk9 | 1854 | 2809 |
| 144814 | mouse Pcsk9 | 1855 | 2810 |
| 144815 | mouse Pcsk9 | 1856 | 2811 |
| 144816 | mouse Pcsk9 | 1857 | 2812 |
| 144817 | mouse Pcsk9 | 1858 | 2813 |
| 144818 | mouse Pcsk9 | 1859 | 2814 |
| 144819 | mouse Pcsk9 | 1860 | 2815 |
| 144820 | mouse Pcsk9 | 1861 | 2816 |
| 144821 | mouse Pcsk9 | 1862 | 2817 |
| 144822 | mouse Pcsk9 | 1863 | 2818 |
| 144823 | mouse Pcsk9 | 1864 | 2819 |
| 144824 | mouse Pcsk9 | 1865 | 2820 |
| 144825 | mouse Pcsk9 | 1866 | 2821 |
| 144826 | mouse Pcsk9 | 1867 | 2822 |
| 144827 | mouse Pcsk9 | 1868 | 2823 |
| 144828 | mouse Pcsk9 | 1869 | 2824 |
| 144829 | mouse Pcsk9 | 1870 | 2825 |
| 144830 | mouse Pcsk9 | 1871 | 2826 |
| 144831 | mouse Pcsk9 | 1872 | 2827 |
| 144832 | mouse Pcsk9 | 1873 | 2828 |
| 144833 | mouse Pcsk9 | 1874 | 2829 |
| 144834 | mouse Pcsk9 | 1875 | 2830 |
| 144835 | mouse Pcsk9 | 1876 | 2831 |
| 144836 | mouse Pcsk9 | 1877 | 2832 |
| 144837 | mouse Pcsk9 | 1878 | 2833 |
| 144838 | mouse Pcsk9 | 1879 | 2834 |
| 144839 | mouse Pcsk9 | 1880 | 2835 |
| 144840 | mouse Pcsk9 | 1881 | 2836 |
| 144841 | mouse Pcsk9 | 1882 | 2837 |
| 144842 | mouse Pcsk9 | 1883 | 2838 |
| 144843 | mouse Pcsk9 | 1884 | 2839 |
| 144844 | mouse Pcsk9 | 1885 | 2840 |
| 144845 | mouse Pcsk9 | 1886 | 2841 |
| 144846 | mouse Pcsk9 | 1887 | 2842 |
| 144847 | mouse Pcsk9 | 1888 | 2843 |
| 144848 | mouse Pcsk9 | 1889 | 2844 |
| 144849 | mouse Pcsk9 | 1890 | 2845 |
| 144850 | mouse Pcsk9 | 1891 | 2846 |
| 144851 | mouse Pcsk9 | 1892 | 2847 |
| 144852 | mouse Pcsk9 | 1893 | 2848 |
| 144853 | mouse Pcsk9 | 1894 | 2849 |
| 144854 | mouse Pcsk9 | 1895 | 2850 |
| 144855 | mouse Pcsk9 | 1896 | 2851 |
| 144856 | mouse Pcsk9 | 1897 | 2852 |
| 144857 | mouse Pcsk9 | 1898 | 2853 |
| 144858 | mouse Pcsk9 | 1899 | 2854 |
| 144859 | mouse Pcsk9 | 1900 | 2855 |
| 144860 | mouse Pcsk9 | 1901 | 2856 |
| 144861 | mouse Pcsk9 | 1902 | 2857 |
| 144862 | mouse Pcsk9 | 1903 | 2858 |
| 144863 | mouse Pcsk9 | 1904 | 2859 |
| 144864 | mouse Pcsk9 | 1905 | 2860 |
| 144865 | mouse Pcsk9 | 1906 | 2861 |
| 144866 | mouse Pcsk9 | 1907 | 2862 |
| 144867 | mouse Pcsk9 | 1908 | 2863 |
| 144868 | mouse Pcsk9 | 1909 | 2864 |
| 144869 | mouse Pcsk9 | 1910 | 2865 |
| 144870 | mouse Pcsk9 | 1911 | 2866 |
| 144871 | mouse Pcsk9 | 1912 | 2867 |
| 144872 | mouse Pcsk9 | 1913 | 2868 |
| 144873 | mouse Pcsk9 | 1914 | 2869 |
| 144874 | mouse Pcsk9 | 1915 | 2870 |
| 144875 | mouse Pcsk9 | 1916 | 2871 |
| 144876 | mouse Pcsk9 | 1917 | 2872 |
| 144877 | mouse Pcsk9 | 1918 | 2873 |
| 144878 | mouse Pcsk9 | 1919 | 2874 |
| 144879 | mouse Pcsk9 | 1920 | 2875 |
| 144880 | mouse Pcsk9 | 1921 | 2876 |
| 144881 | mouse Pcsk9 | 1922 | 2877 |
| 144882 | mouse Pcsk9 | 1923 | 2878 |
| 144883 | mouse Pcsk9 | 1924 | 2879 |
| 144884 | mouse Pcsk9 | 1925 | 2880 |
| 144885 | mouse Pcsk9 | 1926 | 2881 |
| 144886 | mouse Pcsk9 | 1927 | 2882 |
| 144887 | mouse Pcsk9 | 1928 | 2883 |
| 144888 | mouse Pcsk9 | 1929 | 2884 |
| 144889 | mouse Pcsk9 | 1930 | 2885 |
| 144890 | mouse Pcsk9 | 1931 | 2886 |
| 144891 | mouse Pcsk9 | 1932 | 2887 |
| 144892 | mouse Pcsk9 | 1933 | 2888 |
| 144893 | mouse Pcsk9 | 1934 | 2889 |
| 144894 | mouse Pcsk9 | 1935 | 2890 |
| 144895 | mouse Pcsk9 | 1936 | 2891 |
| 144896 | mouse Pcsk9 | 1937 | 2892 |
| 144897 | mouse Pcsk9 | 1938 | 2893 |
| 144898 | mouse Pcsk9 | 1939 | 2894 |
| 144899 | mouse Pcsk9 | 1940 | 2895 |
| 144900 | mouse Pcsk9 | 1941 | 2896 |
| 144901 | mouse Pcsk9 | 1942 | 2897 |
| 144902 | mouse Pcsk9 | 1943 | 2898 |
| 144903 | mouse Pcsk9 | 1944 | 2899 |
| 144904 | mouse Pcsk9 | 1945 | 2900 |
| 144905 | mouse Pcsk9 | 1946 | 2901 |
| 144906 | mouse Pcsk9 | 1947 | 2902 |
| 144907 | mouse Pcsk9 | 1948 | 2903 |
| 144908 | mouse Pcsk9 | 1949 | 2904 |
| 144909 | mouse Pcsk9 | 1950 | 2905 |
| 144910 | mouse Pcsk9 | 1951 | 2906 |
| 144911 | mouse Pcsk9 | 1952 | 2907 |
| 144912 | mouse Pcsk9 | 1953 | 2908 |
| 144913 | mouse Pcsk9 | 1954 | 2909 |
| 144914 | mouse Pcsk9 | 1955 | 2910 |
| 144915 | mouse Pcsk9 | 1956 | 2911 |
| 144916 | mouse Pcsk9 | 1957 | 2912 |
| 144917 | mouse Pcsk9 | 1958 | 2913 |
| 144918 | mouse Pcsk9 | 1959 | 2914 |
| 144919 | mouse Pcsk9 | 1960 | 2915 |
| 144920 | mouse Pcsk9 | 1961 | 2916 |
| 144921 | mouse Pcsk9 | 1962 | 2917 |
| 144922 | mouse Pcsk9 | 1963 | 2918 |
| 144923 | mouse Pcsk9 | 1964 | 2919 |
| 144924 | mouse Pcsk9 | 1965 | 2920 |
| 144925 | mouse Pcsk9 | 1966 | 2921 |
| 144926 | mouse Pcsk9 | 1967 | 2922 |
| 144927 | mouse Pcsk9 | 1968 | 2923 |
| 144928 | mouse Pcsk9 | 1969 | 2924 |
| 144929 | mouse Pcsk9 | 1970 | 2925 |
| 144930 | mouse Pcsk9 | 1971 | 2926 |
| 144931 | mouse Pcsk9 | 1972 | 2927 |
| 144932 | mouse Pcsk9 | 1973 | 2928 |
| 144933 | mouse Pcsk9 | 1974 | 2929 |
| 144934 | mouse Pcsk9 | 1975 | 2930 |

[0320] TABLE 11 provides illustrative target nucleic acids that are useful in the compositions, systems and methods described herein.

TABLE 11
EXEMPLARY TARGET NUCLEIC ACIDS
Exemplary targets

AAVS1, ABCA4, ABCB11, ABCC8, ABCD1, ABCG5, ABCG8, ACAD9, ACADM, ACADVL, ACAT1, ACTA1, ACOX1, ACSF3,
ADA, ADAMTS2, ADGRG1, AGA, AGL, AGPS, AGXT, AHI1, AIRE, ALDH3A2, ALDOB, ALG6, ALK, ALKBH5, ALMS1, ALPL,
AMRC9, AMT, ANAPC10, ANAPC11, ANGPTL3, ANGPTL4, APC, Apo(a), APOCIII (APOC3), APOEε4, APOL1, APP, AQP2, AR,
ARFRP1, ARG1, ARH, ARL13B, ARL6, ARSA, ARSB, ASL, ASNS, ASPA, ASS1, ATM, ATP6V1B1, ATP7A, ATP7B, ATRX, ATXN1,
ATXN10, ATXN2, ATXN3, ATXN7, ATXN8OS, AXIN1, AXIN2, B2M, BACE-1, BAK1, BAP1, BARD1, BAX2, BBS1, BBS10, BBS12,
BBS2, BCKDHA, BCKDHB, BCL2L2, BCS1L, BEST1, Betaglobin gene, BLM, BMPR1A, BRAF, BRAFV600E, BRCA1, BRCA2,
BRIP1, BSND, C9ORF72, CA4, CACNA1A, CAH1, CAPN3, CASR, CBS, CCNB1 CC2D2A, CCR5, CD1, CD2, CD3, CD3D,
CD3Z, CD4, CD5, CD6, CD7, CD8A, CD8B, CD9, CD14, CD18, CD19, CD21, CD22, CD23, CD27, CD28, CD30, CD33, CD34,
CD36, CD38, CD40, CD40L, CD44, CD46, CD47, CD48, CD52, CD55, CD57, CD58, CD59, CD68, CD69, CD72, CD73, CD74,
CD79A, CD80, CD81, CD83, CD84, CD86, CD90, CD93, CD96, CD99, CD100, CD123, CD160, CD163, CD164, CD164L2,
CD166, CD200, CD204, CD207, CD209, CD226, CD244, CD247, CD274, CD276, CD300, CD320, CDC73, CDH1, CDH23,
CDK11, CDK4, CDKN1A, CDKN1B, CDKN1C, CDKN2A, CDKN2B, CEBPA, CELA3B, CEP290, CERKL, CFB, CFTR,
CHCHD10, CHEK2, CHM, CHRNE, CIDEB, CIITA, CLN3, CLN5, CLN6, CLN8, CLRN1, CLTA, CMT1A, CNBP, CNGB1,
CNGB3, COL1A1, COL1A2, COL27A1, COL4A3, COL4A4, COL4A5, COL6A1, COL6A2, COL6A3, COL7A1, CPS1, CPT1A,
CPT2, CRB1, CREBBP, CRX, CRYAA, CTNNA1, CTNNB1, CTNND2, CTNS, CTSK, CXCL12, CYBA, CYBB, CYP11B1, CYP11B2,
CYP17A1, CYP19A1, CYP21A2, CYP27A1, DBT, DCC, DCLRE1C, DERL2, DFNA36, DFNB31, DGAT2, DHCR7, DHDDS,
DICER1, DIS3L2, DLD, DMD, DMPK, DNAH5, DNAI1, DNAI2, DNM2, DNMT1, DPC4, DUX4, DYSF, EDA, EDN3, EDNRB,
EGFR, EIF2B5, EMC2, EMC3, EMD, EMX1, EN1, EPCAM, ERCC6, ERCC8, ESCO2, ETFA, ETFDH, ETHE1, EVC, EVC2, EYS,
F5, F9, FX1, FAH, FAM161A, FANCA, FANCB, FANCC, FANCD1, FANCD2, FANCE, FANCF, FANCG, FANC1, FANCJ,
FANCL, FANCM, FANCN, FANCP, FANCS, FBN1, FGF14, FGFR2, FGFR3, FGA, FGB, FGG, FH, FHL1, FIX, FKRP, FKTN,
FLCN, FMR1, FOXP3, FSCN2, FSHD1, FUS, FUT8, FVIII, FXII, FXN, G6PC, GAA, GALC, GALK1, GALT, GAMT, GATA2,
GATA-4, GBA, GBE1, GCDH, GCGR, GDNF, GFAP, GFM1, GHR, GJB1, GJB2, GLA, GLB1, GLDC, GLE1, GNE, GNPTAB,
GNPTG, GNS, GPAM, GPC3, GPR98, GREM1, GRHPR, GRIN2B, H2AFX, H2AX, HADHA, HAX1, HBA1, HBA2, HBB, HBV
cccDNA, HER2, HEXA, HEXB, HFE, HGSNAT, HLCS, HMGCL, HAO1, HOGA1, HOXB13, HPRPF3, HPRT1, HPS1, HPS3,
HRAS, HRD1, HSD3B2, HSD17B4, HSD17B13, HTT, HUS1, HYAL1, HYLS1, IDS, IDUA, IFITM5, IKBKAP, IL2RG, IL7R,
IMPDH1, INPP5E, IRF4, ITGB2, ITPR1, IVD, JAG1, JAK1, JAK3, KCNC3, KCND3, KCNJ11, KLKB1, KLHL7, KRAS, LAMA1,
LAMA2, LAMA3, LAMB3, LAMC2, LCA5, LDHA, LDLR, LDLRAP1, LHX3, LIFR, LIPA, LMNA, LMOD3, LOR, LOXHD1, LPA,
LPL, LRAT, LRP6, LRPPRC, LRRK2, MADR2, MAN2B1, MAPT, MARC1, MAX, MCM6, MCOLN1, MECP2, MED17, MEFV,
MEN1, MERTK, MESP2, MET, METex14, MFN2, MFSD8, MIA3, MITF, MKL2, MKS1, MLC1, MLH1, MLH3, MMAA, MMAB,
MMACHC, MMADHC, MMD, MP1, MPL, MPV17, MSH2, MSH3, MSH6, MTHFD1L, MTHFR, MTM1, MTRR, MTTP, MUT,
MUTYH, MYC, MYH7, MYO7A, NAGLU, NAGS, NBN, NDRG1, NDUFAF5, NDUFS6, NEB, NF1, NF2, NKX2-5, NOG, NOTCH1,
NOTCH2, NPC1, NPC2, NPHP1, NPHS1, NPHS2, NRAS, NR2E3, NTHL1, NTRK, NTRK1, OAT, OCT4, OFD1, OPA3, OTC,
PAH, PALB2, PAQR8, PAX3, PC, PCCA, PCCB, PCDH15, PCSK9, PD1, PDCD1, PDE6B, PDGFRA, PDHA1, PDHB, PEX1,
PEX10, PEX12, PEX13, PEX14, PEX16, PEX19, PEX2, PEX26, PEX3, PEX5, PEX6, PEX7, PFKM, PHGDH, PHOX2B, PKD1,
PKD2, PKHD1, PKK, PLEKHG4, PMM2, PMP22, PMS1, PMS2, PNPLA3, POLD1, POLE, POMGNT1, POT1, POU5F1, PPM1A,
PPP2R2B, PPT1, PRCD, PRKAG2, PRKAR1A, PRKCG, PRNP, PROM1, PROP1, PRPF31, PRPF8, PRPH2, PRPS1, PSAP,
PSD3, PSD95, PSEN1, PSEN2, PSRC1, PTCH1, PTEN, PTS, PUS1, PYGM, RAB23, RAD50, RAD51C, RAD51D, RAG1, RAG2,
RAPSN, RARS2, RB1, RDH12, RECQL4, RET, RHO, RICTOR, RMRP, ROS1, RP1, RP2, RPE65, RPGR, RPGRIP1L, RPL32P3,
RS1, RTCA, RTEL1, RUNX1, SACS, SAMHD1, SCN1A, SCN2A, SDHA, SDHAF2, SDHB, SDHC, SDHD, SEL1L, SEPSECS,
SERPINA1, SERPINC1, SERPING1, SGCA, SGCB, SGCG, SGSH, SIRT1, SLC12A3, SLC12A6, SLC17A5, SLC22A5, SLC25A13,
SLC25A15, SLC26A2, SLC26A4, SLC35A3, SLC35B4, SLC37A4, SLC39A4, SLC4A11, SLC6A8, SLC7A7, SMAD3, SMAD4,
SMARCA4, SMARCAL1, SMARCB1, SMARCE1, SMN1, SMPD1, SNAI2, SNCA, SNRNP200, SOD1, SOX10, SPARA7, SPTBN2,
STAR, STAT3, STK11, SUFU, SUMF1, SYNE1, SYNE2, SYS1, TARDBP, TAT, TBK1, TBP, TCIRG1, TCTN3, TECPR2, TERC,
TERT, TFR2, TGFBR2, TGM1, TH, TLE3, TMEM127, TMEM138, TMEM216, TMEM43, TMEM67, TMPRSS6, TNNI2, TNNT1,
TNNT3, TOP1, TOPORS, TP53, TPM2, TPM3, TPP1, TRAC, TRMU, TSC1, TSC2, TSFM, TSPAN14, TTBK2, TTC8, TTPA, TTR,
TULP1, TYMP, UBE2G2, UBE2J1, UBE3A, USH1C, USH1G, USH2A, VEGF, VHL, VPS13A, VPS13B, VPS35, VPS45, VRK1,
VSX2, VWF, WAS, WDR19, WDR48, WNT10A, WRN, WS2B, WS2C, WT1, XPA, XPC, XPF, XRCC3, YAP1, ZAC1, ZEB1,
ZFYVE26, and ZNF423

[0321] TABLE 12 provides illustrative diseases and syndromes for compositions, systems and methods described herein.

TABLE 12
DISEASES AND SYNDROMES
Exemplary Diseases and Syndromes

11-hydroxylase deficiency; 17,20-desmolase deficiency; 17-hydroxylase deficiency; 3-hydroxyisobutyrate aciduria; 3-
hydroxysteroid dehydrogenase deficiency; 46,XY gonadal dysgenesis; AAA syndrome; ABCA3 deficiency; ABCC8-associated
hyperinsulinism; aceruloplasminemia; acromegaly; achondrogenesis type 2; acral peeling skin syndrome; acrodermatitis
enteropathica; acute bacterial infection; adrenocortical micronodular hyperplasia; adrenoleukodystrophies;
adrenomyeloneuropathies; Aicardi-Goutieres syndrome; AIDS; Alagille disease (also called Alagille Syndrome); Alexander
Disease; Alpers syndrome; alpha-1 antitrypsin deficiency (AATD); alpha-mannosidosis; Alstrom syndrome; Alzheimer's disease;
amebic dysentery; amelogenesis imperfecta; amish type microcephaly; amyotrophic lateral sclerosis (ALS); anaplastic large cell
lymphoma; anauxetic dysplasia; androgen insensitivity syndrome; angiopathic thrombosis; antiphospholipid syndrome; Antley-
Bixler syndrome; APECED; Apert syndrome; aplasia of lacrimal and salivary glands; arginase-1 deficiency; argininosuccinic
aciduria; argininemia; arrhythmogenic right ventricular dysplasia; Arts syndrome; ARVD2; arylsulfatase deficiency type
metachromatic leukodystrophy; ataxia telangiectasia; atherosclerotic cardiovascular disease; autoimmune lymphoproliferative
syndrome; autoimmune polyglandular syndrome type 1; autosomal dominant anhidrotic ectodermal dysplasia; autosomal dominant
deafness; autosomal dominant polycystic kidney disease; autosomal recessive microtia; autosomal recessive renal glucosuria;
autosomal visceral heterotaxy; babesiosis; bacterial vaginosis; balantidial dysentery; Bardet-Biedl syndrome; Bartter syndrome;
basal cell nevus syndrome; Batten disease; benign recurrent intrahepatic cholestasis; beta-mannosidosis; β-thalassemia; Bethlem
myopathy; Blackfan-Diamond anemia; bleeding disorder (coagulation); blepharophimosis; Byler disease; C syndrome; CADASIL;
calcific aortic stenosis; calcification of joints and arteries; carbamoyl phosphate synthetase I deficiency; carcinoid syndrome
diarrhea; cardiofaciocutaneous syndrome; cardiovascular disease (CVD); Carney triad; carnitine palmitoyltransferase deficiencies;
cartilage-hair hypoplasia; cblC type of combined methylmalonic aciduria; CD18 deficiency; CD3Z-associated primary T-cell
immunodeficiency; CD40L deficiency; CDAGS syndrome; CDG1A; CDG1B; CDG1M; CDG2C; CEDNIK syndrome; central core
disease; centronuclear myopathy; cerebral capillary malformation; cerebrooculofacioskeletal syndrome type 4;
cerebrooculogacioskeletal syndrome; cerebrotendinous xanthomatosis; Chaga's Disease; Charcot Marie Tooth Disesase;
chemotherapy; cherubism; CHILD syndrome; chronic granulomatous disease; chronic recurrent multifocal osteomyelitis; cirrhosis;
citrin deficiency; citrullinemia type I; citrullinemia type II; classic hemochromatosis; CNPPB syndrome; cobalamin C disease;
Cockayne syndrome; coenzyme Q10 deficiency; Coffin-Lowry syndrome; Cohen syndrome; combined deficiency of coagulation
factors V; common variable immune deficiency 3; complement hyperactivation; complete androgen insentivity; cone rod
dystrophies; conformational diseases; congenital adrenal hyperplasia; congenital bile adid synthesis defect type 1; congenital bile
adid synthesis defect type 2; congenital defect in bile acid synthesis type; congenital erythropoietic porphyria; congenital
generalized osteosclerosis; congenital hyperplasia (CAH); congenital muscular dystrophy 1A (MDC1A); Cornelia de Lange
syndrome; coronary heart disease; Cousin syndrome; Cowden disease; COX deficiency; Cri du chat syndrome; Crigler-Najjar
disease; Crigler-Najjar syndrome type 1; Crisponi syndrome; Crouzon syndrome; Currarino syndrome; Curth-Macklin type
ichthyosis hystrix; cutaneous T-cell lymphoma; cutis laxa; cystic fibrosis; cystinosis; d-2-hydroxyglutaric aciduria; DDP syndrome;
Dejerine-Sottas disease; Denys-Drash syndrome; Dercum disease; desmin cardiomyopathy; desmin myopathy; DGUOK-associated
mitochondrial DNA depletion; diabetes Type I; diabetes Type II; disorders of glutamate metabolism; distal spinal muscular atrophy
type 5; DNA repair diseases; dominant optic atrophy; Doyne honeycomb retinal dystrophy; Dravet Syndrome; Duchenne muscular
dystrophy; dyskeratosis congenita; Ehlers-Danlos syndrome type 4; Ehlers-Danlos syndromes; Elejalde disease; Ellis-van Creveld
disease; Emery-Dreifuss muscular dystrophies; encephalomyopathic mtDNA depletion syndrome; encephalitis; enzymatic diseases;
EPCAM-associated congenital tufting enteropathy; epidermolysis bullosa with pyloric atresia; epilepsy; fabry disease;
facioscapulohumeral muscular dystrophy; Factor V Leiden thrombophilia; Faisalabad histiocytosis; familial atypical
mycobacteriosis; familial capillary malformation-arteriovenous; Familial Creutzfeld-Jakob disease; familial esophageal achalasia;
familial glomuvenous malformation; familial hemophagocytic lymphohistiocytosis; familial mediterranean fever; familial
megacalyces; familial schwannomatosis; familial spina bifida; familial splenic asplenia/hypoplasia; familial thrombotic
thrombocytopenia purpura; Fanconi disease (Fanconi anemia); Feingold syndrome; FENIB; fibrodysplasia ossificans progressiva;
FKTN; Fragile X syndrome; Francois-Neetens fleck corneal dystrophy; Frasier syndrome; Friedreich's ataxia; FTDP-17; Fuchs
corneal dystrophy; fucosidosis; G6PD deficiency; galactosialidosis; Galloway syndrome; Gardner syndrome; Gaucher disease;
Gitelman syndrome; glaucoma; GLUT1 deficiency; GM2- Gangliosidoses (e.g., Tay Sachs Disease, Sandhoff Disease) glycogen
storage disease type 1b; glycogen storage disease type 2; glycogen storage disease type 3; glycogen storage disease type 4; glycogen
storage disease type 9a; glycogen storage diseases; GM1-gangliosidosis; Greenberg syndrome; Greig cephalopolysyndactyly
syndrome; hair genetic diseases; hairy cell leukemia; HANAC syndrome; harlequin type ichtyosis congenita; HDR syndrome;
hearing loss; heart failure; hemochromatosis type 3; hemochromatosis type 4; hemolytic anemia; hemolytic uremic syndrome;
hemophilia A; hemophilia B; hepatitis C infection; hereditary angioedema type 3; hereditary angioedemas; hereditary hemorrhagic
telangiectasia; hereditary hypofibrinogenemia; hereditary intraosseous vascular malformation; hereditary leiomyomatosis and renal
cell cancer; hereditary neuralgic amyotrophy; hereditary orotic aciduria; hereditary sensory and autonomic neuropathy type;
Hermansky-Pudlak disease; HHH syndrome; HHT2; hidrotic ectodermal dysplasia type 1; hidrotic ectodermal dysplasias;
histiocytic sarcoma; HNF4A-associated hyperinsulinism; HNPCC; homozygous familial hypercholesterolemia; hormone refractory
prostate cancer; human immunodeficiency with microcephaly; Human monkeypox (MPX); human papilloma virus (HPV) infection;
Huntington's disease; hyper-IgD syndrome; hyperinsulinism-hyperammonemia syndrome; hypercholesterolemia; hypertension;
hypertrophy of the retinal pigment epithelium; hypochondrogenesis; hypohidrotic ectodermal dysplasia; hypotension; ICF
syndrome; idiopathic congenital intestinal pseudo-obstruction; immunodeficiency 13; immunodeficiency 17; immunodeficiency 25;
immunodeficiency with hyper-IgM type 1; immunodeficiency with hyper-IgM type 3; immunodeficiency with hyper-IgM type 4;
immunodeficiency with hyper-IgM type 5; immunoglobulin alpha deficiency; inborn errors of thyroid metabolism; infantile
myofibromatosis; infantile visceral myopathy; infantile X-linked spinal muscular atrophy; influenza A; influenza B; intradialytic
hypotension; intrahepatic cholestasis of pregnancy; invasive aspergillosis; invasive mucormycosis; IPEX syndrome; IRAK4
deficiency; isolated congenital asplenia; Jeune syndrome; Johanson-Blizzard syndrome; Joubert syndrome; JP-HHT syndrome;
juvenile hemochromatosis; juvenile hyalin fibromatosis; juvenile nephronophthisis; Kabuki mask syndrome; Kallmann syndromes;
Kartagener syndrome; KCNJ11-associated hyperinsulinism; Kearns-Sayre syndrome; Kostmann disease; Kozlowski type of
spondylometaphyseal dysplasia; Krabbe disease; LADD syndrome; late infantile-onset neuronal ceroid lipofuscinosis; LCK
deficiency; LDHCP syndrome; Leber Congenital Amaurosis Teyp 10; Legius syndrome; Leigh syndrome; lethal congenital
contracture syndrome 2; lethal congenital contracture syndromes; lethal contractural syndrome type 3; lethal neonatal CPT
deficiency type 2; lethal osteosclerotic bone dysplasia; leukocyte adhesion deficiency; Li Fraumeni syndrome; LIG4 syndrome;
limb girdle muscular dystrophies (LGMD1B, LGMD2A, LGMD2B); lipodystrophy; lissencephaly type 1; lissencephaly type 3;
Loeys-Dietz syndrome; low phospholipid-associated cholelithiasis; Lynch Syndrome; lysinuric protein intolerance; a lysosomal
storage disease (e.g., Hunter syndrome, Hurler syndrome); macular dystrophy; Maffucci syndrome; Majeed syndrome; malaria;
mannose-binding protein deficiency; mantle cell lymphoma; Marfan disease; Marshall syndrome; MASA syndrome; mastocytosis;
MCAD deficiency; McCune-Albright syndrome; MCKD2; Meckel syndrome; MECP2 Duplication Syndrome; Meesmann corneal
dystrophy; megacystis-microcolon-intestinal hypoperistalsis; megaloblastic anemia type 1; MEHMO; MELAS; Melnick-Needles
syndrome; MEN2s; meningitis; Menkes disease; metachromatic leukodystrophies; methymalonic acidemia due to transcobalamin
receptor defect; methylmalonic acidurias; methylvalonic aciduria; microcoria-congenital nephrosis syndrome; microvillous atrophy;
migraine; mitochondrial neurogastrointestinal encephalomyopathy; monilethrix; monosomy X; mosaic trisomy 9 syndrome; Mowat-
Wilson syndrome; mucolipidosis type 2; mucolipidosis type Ma; mucolipidosis type IV; mucopolysaccharidoses;
mucopolysaccharidosis type 3A; mucopolysaccharidosis type 3C; mucopolysaccharidosis type 4B; multiminicore disease; multiple
acyl-CoA dehydrogenation deficiency; multiple cutaneous and mucosal venous malformations; multiple endocrine neoplasia type 1;
multiple myeloma; multiple sclerosis; multiple sulfatase deficiency; mycosis fungoides; myotonic dystrophy; NAIC; nail-patella
syndrome; nemaline myopathies; neonatal diabetes mellitus; neonatal surfactant deficiency; nephronophtisis; Netherton disease;
neurofibromatoses; neurofibromatosis type 1; Niemann-Pick disease type A; Niemann-Pick disease type B; Niemann-Pick disease
type C; NKX2E; non-alcoholic fatty liver disease (NAFLD); non-alcoholic steatohepatitis (NASH); Noonan syndrome; North
American Indian childhood cirrhosis; NROB1 duplication-associated DSD; ocular genetic diseases; oculo-auricular syndrome;
OLEDAID; oligomeganephronia; oligomeganephronic renal hypolasia; Ollier disease; Opitz-Kaveggia syndrome; ornithine
transcarbamylase deficiency (OTCD); orofaciodigital syndrome type 1; orofaciodigital syndrome type 2; osseous Paget disease;
osteogenesis imperfecta; otopalatodigital syndrome type 2; orthostatic hypotension; overactive bladder; OXPHOS diseases;
palmoplantar hyperkeratosis; panlobar nephroblastomatosis; Parkes-Weber syndrome; Parkinson's disease; partial deletion of
21q22.2-q22.3; Pearson syndrome; Pelizaeus-Merzbacher disease; Pendred syndrome; pentalogy of Cantrell; peroxisomal acyl-
CoA-oxidase deficiency; Peutz-Jeghers syndrome; Pfeiffer syndrome; Pierson syndrome; pigmented nodular adrenocortical disease;
pipecolic acidemia; Pitt-Hopkins syndrome; plasmalogens deficiency; platelet glycoprotein IV deficiency; pleuropulmonary
blastoma and cystic nephroma; pneumonia; polycystic kidney disease; polycystic ovarian disease; polycystic lipomembranous
osteodysplasia; Pompe disease; including infantile onset Pompe disease (IOPD) and late onset Pompe disease (LOPD); porphyrias;
post-herpetic neuralgia; PRKAG2 cardiac syndrome; premature ovarian failure; primary erythermalgia; primary hemochromatoses;
primary hyperoxaluria; progressive familial intrahepatic cholestasis; propionic acidemia; prostate cancer; protein-losing
enteropathy; pulmonary arterial hypertension; pyruvate decarboxylase deficiency; RAPADILINO syndrome; renal cystinosis;
restless leg syndrome; retinitis pigmentosa; Rett Syndrome; rhabdoid tumor predisposition syndrome; Rieger syndrome; ring
chromosome 4; Roberts syndrome; Robinow-Sorauf syndrome; Rothmund-Thomson syndrome; severe combined
immunodeficiency disorder (SCID); Saethre-Chotzen syndrome; Sandhoff disease; SC phocomelia syndrome; SCAS; Schinzel
phocomelia syndrome; schizophrenia; severe hypertriglyceridemia; short rib-polydactyly syndrome type 1; short rib-polydactyly
syndrome type 4; short-rib polydactyly syndrome type 2; short-rib polydactyly syndrome type 3; Shwachman disease; Shwachman-
Diamond disease; sickle cell anemia; Silver-Russell syndrome; Simpson-Golabi-Behmel syndrome; skin infection; Smith-Lemli-
Opitz syndrome; SPG7-associated hereditary spastic paraplegia; spherocytosis; spinocerebellar ataxia; spinal muscular atrophy;
split-hand/foot malformation with long bone deficiencies; spondylocostal dysostosis; sporadic amyotrophic lateral sclerosis;
sporadic visceral myopathy with inclusion bodies; storage diseases; Stargardt macular dystrophy; STRA6-associated syndrome;
stroke; tardive dyskinesia; Tay-Sachs disease; thanatophoric dysplasia; thromboembolism; thrombosis; thrombophilia due to
antithrombin III deficiency; thyroid metabolism diseases; Tourette syndrome; transcarbamylase deficiency; transthyretin-associated
amyloidosis; trisomy 13; trisomy 22; trisomy 2p syndrome; tuberous sclerosis; tufting enteropathy; ullrich congenital muscular
dystrophy (UCMD); urea cycle diseases; Usher Syndrome; Van Den Ende-Gupta syndrome; Van der Woude syndrome; variegated
mosaic aneuploidy syndrome; VLCAD deficiency; von Hippel-Lindau disease; von Willebrand disease; Waardenburg syndrome;
WAGR syndrome; Walker-Warburg syndrome; Werner syndrome; Wilson's disease; Wiskott-Aldrich Syndrome; Wolcott-Rallison
syndrome; Wolfram syndrome; X-linked agammaglobulinemia; X-linked chronic idiopathic intestinal pseudo-obstruction; X-linked
cleft palate with ankyloglossia; X-linked dominant chondrodysplasia punctata; X-linked ectodermal dysplasia; X-linked Emery-
Dreifuss muscular dystrophy; X-linked lissencephaly; X-linked lymphoproliferative disease; X-linked visceral heterotaxy;
xanthinuria type 1; xanthinuria type 2; xeroderma pigmentosum; XPV; and Zellweger disease.

### EXAMPLES

[0322] The following examples are included for illustrative purposes only and are not intended to limit the scope of the invention.

### Example 1. DCasPhi.12—Methyltransferase Fusion Protein Represses Gene Expression in Human Cells

[0323] Plasmids encoding fusion constructs comprising dCasPhi.12 (L26R, E567Q) (SEQ ID NO: 2) were generated. These fusion constructs are described in TABLE 6 and represented in FIG. 1. HEK293T cells were transfected with one of these fusion constructs, a pool of two guide nucleic acids, and a GFP reporter. The guide nucleic acids were designed to target the GFP reporter, such that a complex of a fusion construct and the guide nucleic acid would bind the GFP reporter and repress its expression. The guide nucleic acids had a repeat sequence comprising nucleotide sequence: 5′-AUUGCUCCUUACGAGGAGAC-3′ (SEQ ID NO: 5). The full guide sequences were: 5′-AUUGCUCCUUACGAGGAGACCGGCAAGACUAGCGCAGAGA-3′ (SEQ ID NO: 23) and 5′-AUUGCUCCUUACGAGGAGACGUCGCGCGGCUCCCUACGCA-3′ (SEQ ID NO: 24). Experiments were performed in triplicate. GFP fluorescence was measured by flow cytometry starting at day 5 after transfection, every 2-3 days, ending at day 21. Results are shown in FIG. 2. KRAB(ZNF10)-NLS-dCasPhi12-NLS showed transient repression of GFP as expected. NLS-dCasPhi12-NLS-DNMT3L-KRAB(ZNF10) demonstrated stable repression of GFP reporter through day 21. dCas9 (D10A_H840A) (SEQ ID NO: 22) served as a control with a guide sequence of: 5′-CUCCUCAGAACCAAGCGUCGUUUAAGAGCUAUGCUGGAAACAGCAUAGCAAGU UUAAAUAAGGCUAGUCCGUUAUCAACUUGAAAAAGUGGCACCGAGUCGGUGC-3′ (SEQ ID NO: 25).

### Example 2. In Vitro Screening of CasPhi.12 Guide Nucleic Acids for Repressing Gene Expression in Human Cells

[0324] To screen for CasPhi12 guide nucleic acids for repressing activity, a total of 44 guide nucleic acids were tested with an activated CasPhi12 nuclease to determine if indels were generated in target sequences. Plasmid 1 encoding CasPhi.12 (SEQ ID NO: 1) and plasmid 2 encoding one of the 44 guide nucleic acids were generated. HEK293T cells with a synthetic GFP reporter were transfected with plasmid 1 and plasmid 2. The guide nucleic acids were designed to target the GFP reporter, such that a complex of the CasPhi.12 construct and the guide nucleic acid would bind the GFP reporter and repress its expression. The negative control is CasPhi12 with a non-targeting (NT) guide nucleic acid and the positive control is CasPhi12 with a validated guide nucleic acid. 3 days after transfection, cells were harvested. Next-generation sequencing (NGS) was used to detect indels.

[0325] The study also aimed to evaluate the gene silencing capabilities of the 44 guide nucleic acids when paired with dCasPhi.12(L26R, E567Q) (SEQ ID NO: 2). Plasmid 1 encoding dCasPhi.12(L26R and E567Q)-DNMT3L-KRAB(ZNF10) (SEQID NO: 19) and plasmid 2 encoding one of the 44 guide nucleic acids were generated. The negative control is dCas9 (CRISPROff) (SEQ ID NO: 22) with a NT guide nucleic acid and the positive control is dCasPhi.12 (L26R and E567Q)-DNMT3L-KRAB(ZNF10) (SEQID NO: 19) with a validated guide nucleic acid (−13) and dCas9 (SEQ ID NO: 22) with a targeting guide nucleic acid. The GFP flow cytometry analysis began on day 5 and concluded on day 21. Measurements were taken on day 5, 7, 9, 12, 15, 19 and 21.

[0326] Based on the day 3 Indel results and day 21 GFP repression data, 5 out of the 44 guide nucleic acids (shown in TABLE 13) demonstrated about 20% or greater repressive activity.

TABLE 13
Spacer sequences and full sequences for
the 5 guide nucleic acids

| Distance | | | SEQ | | SEQ |
|---|---|---|---|---|---|
| from | | Spacer | ID | | ID |
| TSS | PL# | Sequence | NO: | Full Sequence | NO: |
| −143 | P134337 | GUAGCUGCC | 2931 | AUUGCUCCUUACGAGG | 2936 |
| | | UUUUGGCAG | | AGACGUAGCUGCCUUU | |
| | | GA | | UGGCAGGA | |
| −118 | P134341 | CGGUCAGAG | 2932 | AUUGCUCCUUACGAGG | 2937 |
| | | GGACAGAGA | | AGACCGGUCAGAGGGA | |
| | | CC | | CAGAGACC | |
| −173 | P134346 | CGCAGUAGG | 2933 | AUUGCUCCUUACGAGG | 2938 |
| | | AAUGCUCAA | | AGACCGCAGUAGGAAU | |
| | | GC | | GCUCAAGC | |
| −220 | P134358 | ACGGGUGCA | 2934 | AUUGCUCCUUACGAGG | 2939 |
| | | CGUAGCUCA | | AGACACGGGUGCACGU | |
| | | GG | | AGCUCAGG | |
| −193 | P134364 | GAGAGAGGC | 2935 | AUUGCUCCUUACGAGG | 2940 |
| | | CCAGCUACU | | AGACGAGAGAGGCCCA | |
| | | CG | | GCUACUCG | |

[0327] FIG. 3 illustrates that the majority of guide nucleic acids with repressive activity contain a spacer sequence that is complementary to and/or hybridizes to a target sequence situated upstream of the transcription start site (TSS).

### Example 3. In Vitro Screening of dCasPhi.12—Methyltransferase Fusion Proteins for Repressing Gene Expression in Human Cells

[0328] This study aimed to screen for fusion proteins with improved potency, durability and targeting. A number of plasmids encoding fusion proteins that contain CasPhi.12 mutants (dCasPhi.12) and at least one effector partner selected from DNMT3L, DNMT3A, KRAB(ZNF10) and KRAB(ZIM3) in different orientations were generated. These fusion protein constructs are listed as follows:
[0329] (a) dCasPhi.12 (L26K, A121Q, and E567Q)-DNMT3L-KRAB(ZNF10)
[0330] (b) dCasPhi.12 (L26K and E567Q)-DNMT3L-KRAB(ZNF10)
[0331] (c) dCasPhi.12 (L26R and E567Q)-DNMT3L-KRAB(ZNF10)
[0332] (d) dCasPhi.12 (L26R and E567Q)-KRAB(ZNF10)-DNMT3L
[0333] (e) KRAB(ZNF10)-DNMT3L-dCasPhi.12 (L26R and E567Q)
[0334] (f) DNMT3L-KRAB(ZNF10)-dCasPhi.12 (L26R and E567Q)
[0335] (g) DNMT3L-dCasPhi.12 (L26R and E567Q)-KRAB(ZNF10)
[0336] (h) KRAB(ZNF10)-dCasPhi.12 (L26R and E567Q)-DNMT3L
[0337] (i) dCasPhi.12 (L26R and E567Q)-DNMT3L-K(ZIM3)
[0338] (j) dCasPhi.12 (L26R and E567Q)-DNMT3L-KRAB(ZNF10)-K(ZIM3)
[0339] (k) K(ZIM3)-dCasPhi.12 (L26R and E567Q)-DNMT3L-KRAB(ZNF10)
[0340] (l) K(ZIM3)-KRAB(ZNF10)-DNMT3L-dCasPhi.12 (L26R and E567Q)
[0341] (m) K(ZIM3)-KRAB(ZNF10)-dCasPhi.12 (L26R and E567Q)-DNMT3L
[0342] (n) DNMT3L-dCasPhi.12 (L26R and E567Q)-KRAB(ZNF10)-K(ZIM3)

[0343] Two exemplary guide nucleic acids (gTR079 TSS-13 and gKD010 TSS-118) were used for the evaluation. TABLE 14 provides the spacer sequences and full sequences of the two exemplary guide nucleic acids.

TABLE 14
Spacer sequences and full sequences
of the two exemplary guide nucleic
acids

| | Dis- | | | | | |
|---|---|---|---|---|---|---|
| | tance | | Spacer | SEQ | Full | SEQ |
| gRNA | from | | Se- | ID | Se | NO: |
| Name | TSS | PL# | quence | NO: | quence | ID |
| gTR079 | −13 | PL25402 | CGGCA | 294 | AUUGCUC | 2942 |
| | | | AGACU | 1 | CUUACGA | |
| | | | AGCGC | | GGAGACC | |
| | | | AGAGA | | GGCAAGA | |
| | | | | | CUAGCGC | |
| | | | | | AGAGA | |
| gKD010 | −118 | PL34341 | CGGUC | 293 | AUUGCUC | 2937 |
| | | | AGAGG | 2 | CUUACGA | |
| | | | GACAG | | GGAGACC | |
| | | | AGACC | | GGUCAGA | |
| | | | | | GGGACAG | |
| | | | | | AGACC | |

[0344] HEK293T cells with a synthetic GFP reporter were transfected with plasmid 1 encoding a fusion protein construct as described above and plasmid 2 encoding a guide nucleic acid as provided in TABLE 14. The GFP flow cytometry analysis began on day 5 and concluded on day 21. Measurements were taken on day 5, 7,9, 12,15, 19 and 21.

[0345] FIGS. 4A and 4B show the effects of different CasPhi.12 mutants on the repressive activity of the fusion constructs. The results show that the fusion protein dCasPhi.12(L26K and E567Q)-DNMT3L-KRAB(ZNF10) exhibits better repressive activity than dCasPhi.12(L26K, A121Q, and E567Q)-DNMT3L-KRAB(ZNF10) and dCasPhi.12 (L26R and E567Q)-DNMT3L-KRAB(ZNF10) when paired with the guide nucleic acid gTR-79 (FIG. 4A) or gKD010 (FIG. 4B).

[0346] FIGS. 5A and 5B depict the effects of the different orientations of dCasPhi.12 in conjunction with effector partners DNMT3L and KRAB(ZNF10) on the performance of the fusion constructs. The results show that dCasPhi.12 (L26R and E567Q)-DNMT3L-KRAB(ZNF10) emerged as the most effective fusion protein when paired with the guide nucleic acid gTR-79 (FIG. 5A) or gKD010 (FIG. 5B). dCasPhi.12 (L26R and E567Q)-KRAB(ZNF10)-DNMT3L and KRAB(ZNF10)-DNMT3L-dCasPhi.12 (L26R and E567Q) have similar performance.

[0347] FIGS. 6A-6F present a side-by-side comparison of KRAB(ZNF10) and KRAB(ZIM3) in the fusion proteins. When swapping KRAB(ZNF10) with KRAB(ZIM3), the fusion proteins, including dCasPhi12(L26R and E567Q)-DNMT3L-X (FIG. 6A), X-dCasPhi12(L26R and E567Q)-DNMT3L-DNMT3A (FIG. 6B), DNMT3A-DNMT3L-dCasPhi12(L26R and E567Q)-X (FIG. 6C), DNMT3L-X-dCasPhi12(L26R and E567Q) (FIG. 6D), X-dCasPhi12(L26R and E567Q)-DNMT3L (FIG. 6E), and X-dCasPhi12(L26R and E567Q) (FIG. 6F), wherein X is selected from KRAB(ZNF10) and KRAB(ZIM3), display similar repressive activity. The results indicate that, compared to KRAB(ZNF10), KRAB(ZIM3) imparts a comparable repressive activity to the fusion proteins.

[0348] FIGS. 7A and 7B illustrate the effect of combining KRAB(ZNF10) and KRAB(ZIM3) in a single fusion protein on the performance of the fusion constructs. The results show that when paired with the guide nucleic acid gTR-79 (FIG. 7A) or gKD010 (FIG. 7B), the fusion proteins with both KRAB(ZNF10) and KRAB(ZIM3) display repressive activity comparable to those containing either KRAB(ZNF10) or KRAB(ZIM3) alone.

### Example 4. In Vitro Screening of CasM.265466 Guide Nucleic Acids and CasM.265466—Methyltransferase Fusion Proteins for Repressing Gene Expression in Human Cells

[0349] To screen for CasM.265466 guide nucleic acids for repressing activity, a total of 40 guide nucleic acids were generated and tested with an activated nuclease to determine if indels were generated in target sequences. HEK293T cells with a synthetic GFP reporter were transfected with Plasmid 1 encoding CasM.265466 (SEQ ID NO: 35) and plasmid 2 encoding one of the 40 guide nucleic acids. The guide nucleic acids were designed to target the GFP reporter, such that a complex of the CasM.265466 construct and the guide nucleic acid would bind the GFP reporter and repress its expression. The negative control is CasM.265466 with a non-targeting (NT) guide nucleic acid and the positive control is CasM.265466 with a validated guide nucleic acid. 3 days after transfection, cells were harvested. Next-generation sequencing (NGS) was used to detect Indels.

[0350] The Day 3 Indel data led to the identification of 23 promising guide nucleic acids. The Indel results indicate that that the majority of guide nucleic acids achieving higher Indel rates contain a spacer sequence that is complementary to and/or hybridizes to a target sequence situated upstream of the transcription start site (TSS).

[0351] The study also aimed to evaluate the gene silencing capabilities of a fusion protein that includes a CasM.265466 mutant, dCasM.265466 (D220R and E335Q), when paired with one of the 23 guide nucleic acids. The fusion constructs including CasM.265466 mutants are listed as follows:
[0352] (a) KRAB(ZNF10)-dCasM.265466 (D220R and E335Q)-DMNT3L-DMNT3A
[0353] (b) KRAB(ZNF10)-dCasM.265466 (D220R and E335Q)-DMNT3L
[0354] (c) DNMT3L-KRAB(ZNF10)-dCasM.265466 (D220R and E335Q)
[0355] (d) DNMT3A-DNMT3L-dCasM.265466 (D220R and E335Q)-KRAB(ZNF10)
[0356] (e) dCasM.265466 (D220R and E335Q)-DNMT3L-KRAB(ZNF10)
[0357] (f) KRAB(ZNF10)-dCasM.265466 (D220R and E335Q)

[0358] HEK293T cells with a synthetic GFP reporter were transfected with plasmid 1 encoding one of the fusion constructs and plasmid 2 encoding one of the 23 guide nucleic acids. The negative control is dCas9 (CRISPROff) (SEQ ID NO: 22) with a non-targeting guide nucleic acid (NT guide) and the positive control is dCasPhi(L26R, E567Q)-DNMT3L-KRAB(ZNF10) (EpiCasPhi) with a validated guide nucleic acid. The GFP flow cytometry analysis began on day 5 and concluded on day 21. Measurements were taken on day 5, 7, 9, 12,15, 19 and 21.

[0359] Based on the day 21 GFP repression data, 6 out of the 23 guide nucleic acids were identified to show repressive activity. TABLE 15 provides the spacer sequences and full sequences of the 6 guide nucleic acids paired with dCasM.265466 fusion proteins for targeting GFP.

TABLE 15
Spacer sequences and full sequences of the 6 guide nucleic acids

| Distance | | | SEQ | | SEQ |
|---|---|---|---|---|---|
| from | | Spacer | ID | | ID |
| TSS | PI# | Sequence | NO: | Full Sequence | NO: |
| −398 | P134398 | CAGUGCC | 3000 | ACAGCUUAUUUGGAAGCUGA | 2944 |
| | | AGGUGA | | AAUGUGAGGUUUAUAACACU | |
| | | AAAUCG | | CACAAGAAUCCUGAAAAGGA | |
| | | C | | UGCCAAACCAGUGCCAGGUG | |
| | | | | AAAAUCGC | |
| −373 | P134386 | GAACAG | 3001 | ACAGCUUAUUUGGAAGCUGA | 2945 |
| | | GGAGGA | | AAUGUGAGGUUUAUAACACU | |
| | | GCAGAG | | CACAAGAAUCCUGAAAAGGA | |
| | | AG | | UGCCAAACGAACAGGGAGGA | |
| | | | | GCAGAGAG | |
| −324 | P134403 | UAGGAA | 3002 | ACAGCUUAUUUGGAAGCUGA | 2946 |
| | | CCCGGAU | | AAUGUGAGGUUUAUAACACU | |
| | | GGUGGG | | CACAAGAAUCCUGAAAAGGA | |
| | | G | | UGCCAAACUAGGAACCCGGA | |
| | | | | UGGUGGGG | |
| −221 | P134388 | CGGGUG | 3003 | ACAGCUUAUUUGGAAGCUGA | 2947 |
| | | CACGUA | | AAUGUGAGGUUUAUAACACU | |
| | | GCUCAG | | CACAAGAAUCCUGAAAAGGA | |
| | | GC | | UGCCAAACCGGGUGCACGUA | |
| | | | | GCUCAGGC | |
| −182 | P134392 | AGCGUC | 2999 | ACAGCUUAUUUGGAAGCUGA | 2948 |
| | | AAUUGG | | AAUGUGAGGUUUAUAACACU | |
| | | AGAGAG | | CACAAGAAUCCUGAAAAGGA | |
| | | GC | | UGCCAAACAGCGUCAAUUGG | |
| | | | | AGAGAGGC | |
| −76 | P134380 | CGCAUG | 2943 | ACAGCUUAUUUGGAAGCUGA | 2949 |
| | | UGCAGCC | | AAUGUGAGGUUUAUAACACU | |
| | | AUUGCC | | CACAAGAAUCCUGAAAAGGA | |
| | | U | | UGCCAAACCGCAUGUGCAGC | |
| | | | | CAUUGCCU | |

[0360] FIG. 8 illustrates that the majority of guide nucleic acids with repressive activity contain a spacer sequence that is complementary to and/or hybridizes to a target sequence situated upstream of the transcription start site (TSS). Compared to dCasPhi.12, the candidate guides for dCasM.265466 extend even further into the GAPDH CpG island. FIG. 8 also indicates that the fusion constructs, specifically KRAB(ZNF10)-dCasM.265466 (D220R and E335Q)-DMNT3L-DMNT3A, KRAB(ZNF10)-dCasM.265466 (D220R and E335Q)-DMNT3L, DNMT3L-KRAB(ZNF10)-dCasM.265466 (D220R and E335Q), and DNMT3A-DNMT3L-dCasM.265466 (D220R and E335Q)-KRAB(ZNF10), when paired with the selected guide nucleic acids, display repressive activity. KRAB(ZNF10)-dCasM.265466 (D220R and E335Q)-DMNT3L-DMNT3A demonstrated the highest activity.

[0361] The results also indicate that a triple-effector partner design outperformed the other designs. As depicted in FIG. 9, the fusion construct KRAB(ZNF10)-dCasM.265466 (D220R and E335Q)-DMNT3L-DMNT3A exhibited the highest repressive activity.

[0362] As shown in FIG. 10, when paired with the best performing fusion protein design KRAB(ZNF10)-dCasM.265466 (D220R and E335Q)-DMNT3L-DMNT3A, the guide nucleic acid with a spacer sequence that is complementary to and/or hybridizes to a target sequence situated 221 nucleotides upstream of the TSS (guide −221) exhibited the most potent repressive activity over the 21-day period.

[0363] As shown in FIG. 11, when paired with the best performing guide −221, the triple-effector partner design KRAB(ZNF10)-dCasM.265466-DMNT3L-DMNT3A exhibited the highest repressive activity outperformed other fusion protein designs over the 21-day period.

### Example 5. Repression Validation of Type V Group 9 dCasM Proteins

[0364] This study aimed to evaluate the epigenetic repressive activity of the hypercompact deactivated Cas protein family type V Group 9 dCasM (G9 dCasM) effector proteins including dCasM.288094 (dCasM.094) (SEQ ID NO: 3011), dCasM.288886 (dCasM.886) (SEQ ID NO: 3010), and dCasM.2401960 (dCasM.960) (SEQ ID NO: 3012). Each G9 dCasM (dCasM.094/886/960) has six architectural variations when combined with one or more effector partners selected from NDMT3L, DNMT3A, and KRAB(ZNF10) to constitute a single or multiple appended chromatin effector fusion protein. These fusion constructs are listed as follows:
[0365] (a) DNMT3A-DNMT3L-dCasM.094/886/960-KRAB(ZNF10)
[0366] (b) KRAB(ZNF10)-dCasM.094/886/960IMT3L-DNMT3A
[0367] (c) KRAB(ZNF1)-dCasM.094/886/960-DNMT3L
[0368] (d) dCasM.094/886/960-DNMT3L-KRAB(ZNF10)
[0369] (e) KRAB(ZNF16)-DNMT3L-dCasM.094/886/960
[0370] (f) KRAB(ZNF1)-dCasM.094/886/960

[0371] HEK293T cells with a synthetic GFP reporter were transfected with plasmid 1 encoding a fusion construct and plasmid 2 encoding a guide nucleic acid. The GFP flow cytometry analysis began on day 5 and concluded on day 15. Measurements were taken on day 5, 7, 9, 12, and 15.

[0372] For each G9 dCasM, eight guide nucleic acids were generated for evaluation. These guide nucleic acids comprise spacer sequences that target regions upstream or downstream of the GFP transcription start site (TSS). TABLE 16 provides the spacer sequences and full sequences of the guide nucleic acids paired with each G9 dCasM for targeting GFP.

TABLE 16

| | | | SEQ | | SEQ |
|---|---|---|---|---|---|
| | | Spacer | ID | | ID |
| PL# | Nuclease | Sequence | NO: | Full Sequence | NO: |
| PL32677 | dCasM. | CGUUGCA | 2957 | gUCGGGGCGGCUGUACGCCC | 2981 |
| | 288886 | AAUCACU | | UUAAGUCGAGGCGGAGGCAC | |
| | | CCUCAG | | UCGAUAAAUACCUGAAAAGG | |
| | | | | UAUAUACAACCGUUGCAAAU | |
| | | | | CACUCCUCAG | |
| PL32686 | dCasM. | CGUCGCC | 2958 | gUCGGGGCGGCUGUACGCCC | 2982 |
| | 288886 | GUCCAGC | | UUAAGUCGAGGCGGAGGCAC | |
| | | UCGACC | | UCGAUAAAUACCUGAAAAGG | |
| | | | | UAUAUACAACCGUCGCCGUC | |
| | | | | CAGCUCGACC | |
| PL32691 | dCasM. | UGGAUUC | 2959 | gUAGGGGUGGUUGUGCACCC | 2983 |
| | 288094 | UGCGGCC | | UGAGCGGGAGGUUUUUAAGC | |
| | | GCGCCA | | ACUCCUGAAUUACCCUAUUU | |
| | | | | GAAAAGGUAAACACAACUGG | |
| | | | | AUUCUGCGGCCGCGCCA | |
| PL32692 | dCasM. | CCUGGGA | 2960 | gUAGGGGUGGUUGUGCACCC | 2984 |
| | 288094 | CGCAUGC | | UGAGCGGGAGGUUUUUAAGC | |
| | | GUAGGG | | ACUCCUGAAUUACCCUAUUU | |
| | | | | GAAAAGGUAAACACAACCCU | |
| | | | | GGGACGCAUGCGUAGGG | |
| PL32707 | dCasM. | CCGCAAU | 2961 | gUAGGGGUGGUUGUGCACCC | 2985 |
| | 288094 | GGCUCAG | | UGAGCGGGAGGUUUUUAAGC | |
| | | GUUUGU | | ACUCCUGAAUUACCCUAUUU | |
| | | | | GAAAAGGUAAACACAACCCG | |
| | | | | CAAUGGCUCAGGUUUGU | |
| PL32715 | dCasM. | CCGUAGG | 2962 | gUAGGGGUGGUUGUGCACCC | 2986 |
| | 288094 | UGGCAUC | | UGAGCGGGAGGUUUUUAAGC | |
| | | GCCCUC | | ACUCCUGAAUUACCCUAUUU | |
| | | | | GAAAAGGUAAACACAACCCG | |
| | | | | UAGGUGGCAUCGCCCUC | |
| PL32716 | dCasM. | CUCACCA | 2963 | gUAGGGGUGGUUGUGCACCC | 2987 |
| | 288094 | UGGUGGC | | UGAGCGGGAGGUUUUUAAGC | |
| | | GCGGCC | | ACUCCUGAAUUACCCUAUUU | |
| | | | | GAAAAGGUAAACACAACCUC | |
| | | | | ACCAUGGUGGCGCGGCC | |
| PL32723 | dCasM. | UCGCGCG | 2964 | gUAGGGGUGGUUGUGCACCC | 2988 |
| | 288094 | GCUCCCU | | UGAGCGGGAGGUUUUUAAGC | |
| | | ACGCAU | | ACUCCUGAAUUACCCUAUUU | |
| | | | | GAAAAGGUAAACACAACUCG | |
| | | | | CGCGGCUCCCUACGCAU | |
| PL32728 | dCasM. | CGUUGCA | 2965 | gUAGGGGUGGUUGUGCACCC | 2989 |
| | 288094 | AAUCACU | | UGAGCGGGAGGUUUUUAAGC | |
| | | CCUCAG | | ACUCCUGAAUUACCCUAUUU | |
| | | | | GAAAAGGUAAACACAACCGU | |
| | | | | UGCAAAUCACUCCUCAG | |
| PL32737 | dCasM. | CGUCGCC | 2966 | gUAGGGGUGGUUGUGCACCC | 2990 |
| | 288094 | GUCCAGC | | UGAGCGGGAGGUUUUUAAGC | |
| | | UCGACC | | ACUCCUGAAUUACCCUAUUU | |
| | | | | GAAAAGGUAAACACAACCGU | |
| | | | | CGCCGUCCAGCUCGACC | |
| PL32742 | dCasM. | UGGAUUC | 2967 | gAGGGGCCACUUGUAUUGGC | 2991 |
| | 2401960 | UGCGGCC | | CUGAGCAGGAGGGUGUAAUU | |
| | | GCGCCA | | GCCACUCCUGAAUGACCUGA | |
| | | | | AAAGGUUGAUACAACUGGAU | |
| | | | | UCUGCGGCCGCGCCA | |
| PL32743 | dCasM. | CCUGGGA | 2968 | gAGGGGCCACUUGUAUUGGC | 2992 |
| | 2401960 | CGCAUGC | | CUGAGCAGGAGGGUGUAAUU | |
| | | GUAGGG | | GCCACUCCUGAAUGACCUGA | |
| | | | | AAAGGUUGAUACAACCCUGG | |
| | | | | GACGCAUGCGUAGGG | |
| PL32758 | dCasM. | CCGCAAU | 2969 | gAGGGGCCACUUGUAUUGGC | 299 |
| | 2401960 | GGCUCAG | | CUGAGCAGGAGGGUGUAAUU | |
| | | GUUUGU | | GCCACUCCUGAAUGACCUGA | |
| | | | | AAAGGUUGAUACAACCCGCA | |
| | | | | AUGGCUCAGGUUUGU | 3 |
| PL32766 | dCasM. | CCGUAGG | 2970 | gAGGGGCCACUUGUAUUGGC | 2994 |
| | 2401960 | UGGCAUC | | CUGAGCAGGAGGGUGUAAUU | |
| | | GCCCUC | | GCCACUCCUGAAUGACCUGA | |
| | | | | AAAGGUUGAUACAACCCGUA | |
| | | | | GGUGGCAUCGCCCUC | |
| PL32767 | dCasM. | CUCACCA | 2971 | gAGGGGCCACUUGUAUUGGC | 2995 |
| | 2401960 | UGGUGGC | | CUGAGCAGGAGGGUGUAAUU | |
| | | GCGGCC | | GCCACUCCUGAAUGACCUGA | |
| | | | | AAAGGUUGAUACAACCUCAC | |
| | | | | CAUGGUGGCGCGGCC | |
| PL32774 | dCasM. | UCGCGCG | 2972 | gAGGGGCCACUUGUAUUGGC | 2996 |
| | 2401960 | GCUCCCU | | CUGAGCAGGAGGGUGUAAUU | |
| | | ACGCAU | | GCCACUCCUGAAUGACCUGA | |
| | | | | AAAGGUUGAUACAACUCGCG | |
| | | | | CGGCUCCCUACGCAU | |
| PL32779 | dCasM. | CGUUGCA | 2973 | gAGGGGCCACUUGUAUUGGC | 2997 |
| | 2401960 | AAUCACU | | CUGAGCAGGAGGGUGUAAUU | |
| | | CCUCAG | | GCCACUCCUGAAUGACCUGA | |
| | | | | AAAGGUUGAUACAACCGUUG | |
| | | | | CAAAUCACUCCUCAG | |
| PL32788 | dCasM. | CGUCGCC | 2974 | gAGGGGCCACUUGUAUUGGC | 2998 |
| | 2401960 | GUCCAGC | | CUGAGCAGGAGGGUGUAAUU | |
| | | UCGACC | | GCCACUCCUGAAUGACCUGA | |
| | | | | AAAGGUUGAUACAACCGUCG | |
| | | | | CCGUCCAGCUCGACC | |

[0373] Eight control constructs include dCasM.094/886/960 with a NT guide. KRAB(ZNF10)-CasPhi.12, dCasPhi(L26R and E567Q)-DNMT3L-KRAB (EpiCasPhi) with a NT guide, EpiCasPhi, CRISPROff with a NT guide, and CRISPROff.

[0374] FIGS. 12A-12B depict that triple-effector partner designs demonstrate better activity in repressing GFP+ cells than dual-effector partner designs. Further, KRAB(ZNF10)-dCasM.094/886/960-DNMT3L-DNMT3A and KIRAB(ZNF10)-dCasM.094/886/960-DNMT3L repressed GFP+ cells more efficiently and stably than other designs.

### Example 6. Multiple Repressors and Stabilizers Provide Durable Silencing by dCasPhi.12

[0375] Without being bound by theory, KRAB zinc finger domains described herein may serve as a repressor of target expression when fused to a Gas effector protein, while methyltransferase(s) (e.g., DNMT3A and DNMT3L) serve as a stabilizer. In this example, a larger screen of repressors to replace KRAB(ZNF10) was performed, including 2 stability engineered KRAB(ZNF10), 5 wholly non-KRAB mono/bipartite repressor, 22 KRAB+non-KRAB bipartite repressors, and 11 KRAB+KRAB bipartite repressors. Repressors were fused in two orientations on dCasPhi12(L26R, E567Q): dCasPhi.12-D3L-Repressor1(-Repressor 2) dubbed “C-terminus effectors,” and Repressor1(-Repressor2)-dCas-DNMT3L dubbed “N-terminus effectors.” HEK293T cells were transfected with plasmids encoding a GFP reporter, a fusion protein, and a guide nucleic acid, such that if the fusion protein and guide nucleic acid form a complex that binds the GFP reporter, GFP expression will be repressed. Repression was tracked over 27 days post-transfection with flow cytometry.

[0376] FIG. 13 shows that the C-terminus effectors generally have stronger repression than N-terminus effectors. FIG. 14 shows the C-terminus effectors that provided the greatest GFP repression at day 27. TABLE 17 provides the sequences of dCasPhi12(L26R, E567Q)-DNMT3L and the repressors used to generate the data shown in FIG. 14.

TABLE 17
Sequences of dcasphi12(126r, e567q)-dnmt3l and the repressors

| | | SEQ |
|---|---|---|
| Protein | | ID |
| Description | Amino Acid Sequence | NO |
| dCasPhi.12- | MAPKKKRKVGIHGVPAAMIKPTVSQFLTPGFKLIRNHSRTAGR | 3004 |
| DNMT3L | KLKNEGEEACKKFVRENEIPKDECPNFQGGPAIANIIAKSREF | |
| | TEWEIYQSSLAIQEVIFTLPKDKLPEPILKEEWRAQWLSEHG | |
| | LDTVPYKEAAGLNLIIKNAVNTYKGVQVKVDNKNKNNLAKI | |
| | NRKNEIAKLNGEQEISFEEIKAFDDKGYLLQKPSPNKSIYCYQ | |
| | SVSPKPFITSKYHNVNLPEEYIGYYRKSNEPIVSPYQFDRLRIP | |
| | IGEPGYVPKWQYTFLSKKENKRRKLSKRIKNVSPILGIICIKK | |
| | DWCVFDMRGLLRTNHWKKYHKPTDSINDLFDYFTGDPVIDT | |
| | KANVVRFRYKMENGIVNYKPVREKKGKELLENICDQNGSCK | |
| | LATVDVGQNNPVAIGLFELKKVNGELTKTLISRHPTPIDFCN | |
| | KITAYRERYDKLESSIKLDAIKQLTSEQKIEVDNYNNNFTPQN | |
| | TKQIVCSKLNINPNDLPWDKMISGTHFISEKAQVSNKSEIYFT | |
| | STDKGKTKDVMKSDYKWFQDYKPKLSKEVRDALSDIEWRL | |
| | RRESLEFNKLSKSREQDARQLANWISSMCDVIGIQNLVKKNN | |
| | FFGGSGKREPGWDNFYKPKKENRWWINAIHKALTELSQNK | |
| | GKRVILLPAMRTSITCPKCKYCDSKNRNGEKFNCLKCGIELN | |
| | ADIDVATENLATVAITAQSMPKPTCERSGDAKKPVRARKAK | |
| | APEFHDKLAPSYTVVLREAVKRPAATKKAGQAKKKKEFGGPSS | |
| | GAPPPSGGSPAGSPTSTEEGTSESATPESGPGTSTEPSEGSAPGSP | |
| | AGSMGPMEIYKTVSAWKRQPVRVLSLFRNIDKVLKSLGFLESGS | |
| | GSGGGTLKYVEDVTNVVRRDVEKWGPFDLVYGSTQPLGSSCDR | |
| | CPGWYMFQFHRILQYALPRQESQRPFFWIFMDNLLLTEDDQETT | |
| | TRFLQTEAVTLQDVRGRDYQNAMRVWSNIPGLKSKHAPLTPKE | |
| | EEYLQAQVRSRSKLDAPKVDLLVKNCLLPLREYFKYFSQNSLPL | |
| | GSPAGSPTSTEEGTSESATP-(Repressor Sequences in rows below) | |
| | wherein italics represent NLSs, bold represents dCasPhi.12(L26R, | |
| | E567Q), regular font represents mouse Dnmt31 (C terminus domain), | |
| | and double underline represents linker | |
| KRAB | MDAKSLTAWSRTLVTFKDVFVDFTREEWKLLDTAQQIVYRN | 3005 |
| (ZNF10)- | VMLENYKNLVSLGYQLTKPDVILRLEKGEEPWLVESGPGTST | |
| YAF2 | EPSEGSAPGSPAMKDKVEKEKSEKETTSKKNSHKKTRPRLKNVDRS | |
| | SAQHLEVTVGDLTVIITDFKEKTKSPPASSAASADQHSQSGSSSDNT | |
| | wherein bold represents KRAB(ZNF10), italics represent YAF2 | |
| | (Yaf2/RYBP C-terminal binding motif), and regular font represents a | |
| | linker | |
| KRAB | MDAKSLTAWSRTLVTFKDVFVDFTREEWKLLDTAQQIVYRN | 3006 |
| (ZNF10)- | VMLENYKNLVSLGYQLTKPDVILRLEKGEEPWLVESGPGTST | |
| MPP8 | EPSEGSAPGSPAMAEAFGDSEEDGEDVFEVEKILDMKTEGGKVLY | |
| | KVRWKGYTSDDDTWEPEIHLEDCKEVLLEFRKKIAENKAKAVRKDI | |
| | QR | |
| | wherein bold represents KRAB(ZNF10), italics represent MPP8 | |
| | chromodomain, and regular font represents a linker | |
| KRAB | MDAKSLTAWSRTLVTFKDVFVDFTREEWKLLDTAQQIVYRN | 3007 |
| (ZNF10)- | VMLENYKNLVSLGYQLTKPDVILRLEKGEEPWLVESGPGTST | |
| RYBP | EPSEGSAPGSPAMPSEANSIQSANATTKTSETNHTSRPRLKNVDRSTA | |
| | QQLAVTVGNVTVIITDFKEKTRSSSTSSSTVTSSAGSEQQNQSSS | |
| | wherein bold represents KRAB(ZNF10), italics represent RYBP | |
| | (Yaf2/RYBP C-terminal binding motif), and regular font represents a | |
| | linker | |
| CBX3VD- | MEEAEPDEFVVEKVLDRRVVNGKVEYFLKWEGFTDADNTW | 3008 |
| KRAB | EPEENLDCPELIEAFLNSQKSRSSGGGSGGSGSMNNSQGRVTFE | |
| (ZIM3) | DVTVNFTQGEWQRLNPEQRNLYRDVMLENYSNLVSVGQGETTKPD | |
| | VILRLEQGKEPWLEEEEVLGSGRAEKNGDIGGQIWKPKDVKESL | |
| | wherein bold represents CBX3 (chromodomain, Q9D, K33E), italics | |
| | represent ZIM3 (KRAB domain), and regular font represents a linker | |
| CBX5VD- | MEDEYVVEKVLDRRVVKGQVEYLLKWEGFSEEHNTWEPEK | 3009 |
| KRAB | NLDCPELISEFMKKYKKMKEGENSRSSGGGSGGSGSMNNSQG | |
| (ZIM3) | RVTFEDVTVNFTQGEWQRLNPEQRNLYRDVMLENYSNLVSVGQGET | |
| | TKPDVILRLEQGKEPWLEEEEVLGSGRAEKNGDIGGQIWKPKDVKE | |
| | SL | |
| | wherein bold represents CBX5 (chromodomain, Q9D, K33E), italics | |
| | represent ZIM3 (KRAB domain), and regular font represents a linker | |

### Example 7. CasPhi.12 Variant Fusions Provide Robust and Durable Epigenetic Silencing

[0377] CasPhi.12 repressor fusions, gRNA & controls were delivered to a HEK293T GFP expressing cell line by plasmid transfection. EpiCas fusions tested included CasPhi^{L26R/E567Q}-mDnmt3l-KRAB^{ZNF10} (mDnmt3l is a fragment of mouse DNMT3L), CasPhi^{L26R/E567Q}-mDnmt3l-CBX3VD-KRAB^{ZIM3}, CasPhiL26R/E567Q-mDnmt3lKRAB^{ZNF10}-MPP8, and CRISPRoff (Cas9 positive control, see Nunez et al., Cell (2021) for a detailed description of CRISPRoff). The sequences of all constructs and guides tested are provided in TABLE 18.

[0378] Puromycin selection was administered for 3 days to enrich fortransfected cells. gRNAs for EpiCas and controls were designed to target the promoter regulating GFP. GFP silencing was assayed by flow cytometry at various days post-transfection. CasPhi^{L26R/E567Q}-mDnmt301 CBX3VDtKRAB^{ZM3}, CasPhiL26R/E567QFmDnmt3lKRAB^{ZNF10}-MPP8 showed Cas9-CRISPRoff equivalence out to 63 days. See FIG. 15A (% GFP-cells) and FIG. 15B (FITC positive cells) for results. It is worth noting that, unlike Cas9, these CasPhi.12 fusions and guides are capable of fitting into a single AAV vector.

TABLE 18
Exemplary fusion proteins

| Fusion Protein | | SEQ |
|---|---|---|
| Description | Fusion Protein Sequence | ID |
| dCasPhi12(L26R | MAPKKKRKVGIHGVPAAMIKPTVSQFLTPGFKLIRNHSRTA | 3013 |
| E567Q)-mDnmt3l- | GRKLKNEGEEACKKFVRENEIPKDECPNFQGGPAIANIIAKS | |
| KRAB(ZNF10) | REFTEWEIYQSSLAIQEVIFTLPKDKLPEPILKEEWRAQWLSE | |
| (codon | HGLDTVPYKEAAGLNLIIKNAVNTYKGVQVKVDNKNKNNL | |
| optimization) | AKINRKNEIAKLNGEQEISFEEIKAFDDKGYLLQKPSPNKSIY | |
| variant 1 | CYQSVSPKPFITSKYHNVNLPEEYIGYYRKSNEPIVSPYQFDR | |
| (NLS at positions 1- | LRIPIGEPGYVPKWQYTFLSKKENKRRKLSKRIKNVSPILGII | |
| 17; dCas at | CIKKDWCVFDMRGLLRTNHWKKYHKPTDSINDLFDYFTGD | |
| positions 18-734; | PVIDTKANVVRFRYKMENGIVNYKPVREKKGKELLENICDQ | |
| NLS at positions | NGSCKLATVDVGQNNPVAIGLFELKKVNGELTKTLISRHPTP | |
| 735-752; linker at | IDFCNKITAYRERYDKLESSIKLDAIKQLTSEQKIEVDNYNN | |
| positions 753-806; | NFTPQNTKQIVCSKLNINPNDLPWDKMISGTHFISEKAQVSN | |
| mDNMt31 at | KSEIYFTSTDKGKTKDVMKSDYKWFQDYKPKLSKEVRDAL | |
| positions 807-1021; | SDIEWRLRRESLEFNKLSKSREQDARQLANWISSMCDVIGIQ | |
| KRAB (ZNF10) at | NLVKKNNFFGGSGKREPGWDNFYKPKKENRWWINAIHKAL | |
| positions 1022- | TELSQNKGKRVILLPAMRTSITCPKCKYCDSKNRNGEKFNC | |
| 1096) | LKCGIELNADIDVATENLATVAITAQSMPKPTCERSGDAKKP | |
| | VRARKAKAPEFHDKLAPSYTVVLREAVKRPAATKKAGQAK | |
| | KKKEFGGPSSGAPPPSGGSPAGSPTSTEEGTSESATPESGPGT | |
| | STEPSEGSAPGSPAGSMGPMEIYKTVSAWKRQPVRVLSLF | |
| | RNIDKVLKSLGFLESGSGSGGGTLKYVEDVTNVVRRDVE | |
| | KWGPFDLVYGSTQPLGSSCDRCPGWYMFQFHRILQYAL | |
| | PRQESQRPFFWIFMDNLLLTEDDQETTTRFLQTEAVTLQ | |
| | DVRGRDYQNAMRVWSNIPGLKSKHAPLTPKEEEYLQAQ | |
| | VRSRSKLDAPKVDLLVKNCLLPLREYFKYFSQNSLPLMD | |
| | AKSLTAWSRTLVTFKDVFVDFTREEWKLLDTAQQIVYRNV | |
| | MLENYKNLVSLGYQLTKPDVILRLEKGEEPWLV | |
| dCasPhi12(L26R_I | MAPKKKRKVGIHGVPAAMIKPTVSQFLTPGFKLIRNHSRTA | 3014 |
| 471T_E567Q)- | GRKLKNEGEEACKKFVRENEIPKDECPNFQGGPAIANIIAKS | |
| mDnmt3l- | REFTEWEIYQSSLAIQEVIFTLPKDKLPEPILKEEWRAQWLSE | |
| KRAB(ZNF10) | HGLDTVPYKEAAGLNLIIKNAVNTYKGVQVKVDNKNKNNL | |
| (NLS at positions 1- | AKINRKNEIAKLNGEQEISFEEIKAFDDKGYLLQKPSPNKSIY | |
| 17; dCas at | CYQSVSPKPFITSKYHNVNLPEEYIGYYRKSNEPIVSPYQFDR | |
| positions 18-734; | LRIPIGEPGYVPKWQYTFLSKKENKRRKLSKRIKNVSPILGII | |
| NLS at positions | CIKKDWCVFDMRGLLRTNHWKKYHKPTDSINDLFDYFTGD | |
| 735-752; linker at | PVIDTKANVVRFRYKMENGIVNYKPVREKKGKELLENICDQ | |
| positions 753-806; | NGSCKLATVDVGQNNPVAIGLFELKKVNGELTKTLISRHPTP | |
| mDNMt31 at | IDFCNKITAYRERYDKLESSIKLDAIKQLTSEQKIEVDNYNN | |
| positions 807-1021; | NFTPQNTKQIVCSKLNINPNDLPWDKMTSGTHFISEKAQVSN | |
| linker at positions | KSEIYFTSTDKGKTKDVMKSDYKWFQDYKPKLSKEVRDAL | |
| 1022-1041; KRAB | SDIEWRLRRESLEFNKLSKSREQDARQLANWISSMCDVIGIQ | |
| (ZNF10) at | NLVKKNNFFGGSGKREPGWDNFYKPKKENRWWINAIHKAL | |
| positions 1042- | TELSQNKGKRVILLPAMRTSITCPKCKYCDSKNRNGEKFNC | |
| 1116) | LKCGIELNADIDVATENLATVAITAQSMPKPTCERSGDAKKP | |
| | VRARKAKAPEFHDKLAPSYTVVLREAVKRPAATKKAGQAK | |
| | KKKEFGGPSSGAPPPSGGSPAGSPTSTEEGTSESATPESGPGT | |
| | STEPSEGSAPGSPAGSMGPMEIYKTVSAWKRQPVRVLSLFR | |
| | NIDKVLKSLGFLESGSGSGGGTLKYVEDVTNVVRRDVEKW | |
| | GPFDLVYGSTQPLGSSCDRCPGWYMFQFHRILQYALPRQES | |
| | QRPFFWIFMDNLLLTEDDQETTTRFLQTEAVTLQDVRGRDY | |
| | QNAMRVWSNIPGLKSKHAPLTPKEEEYLQAQVRSRSKLDAP | |
| | KVDLLVKNCLLPLREYFKYFSQNSLPLGSPAGSPTSTEEGTS | |
| | ESATPMDAKSLTAWSRTLVTFKDVFVDFTREEWKLLDTAQ | |
| | QIVYRNVMLENYKNLVSLGYQLTKPDVILRLEKGEEPWLV | |
| dCasPhi12(L26K_ | MAPKKKRKVGIHGVPAAMIKPTVSQFLTPGFKLIRNHSRTA | 3015 |
| E567Q)-mDnmt3l- | GKKLKNEGEEACKKFVRENEIPKDECPNFQGGPAIANIIAKS | |
| KRAB(ZNF10) | REFTEWEIYQSSLAIQEVIFTLPKDKLPEPILKEEWRAQWLSE | |
| (NLS at positions 1- | HGLDTVPYKEAAGLNLIIKNAVNTYKGVQVKVDNKNKNNL | |
| 17; dCas at | AKINRKNEIAKLNGEQEISFEEIKAFDDKGYLLQKPSPNKSIY | |
| positions 18-734; | CYQSVSPKPFITSKYHNVNLPEEYIGYYRKSNEPIVSPYQFDR | |
| NLS at positions | LRIPIGEPGYVPKWQYTFLSKKENKRRKLSKRIKNVSPILGII | |
| 735-752; linker at | CIKKDWCVFDMRGLLRTNHWKKYHKPTDSINDLFDYFTGD | |
| positions 753-806; | PVIDTKANVVRFRYKMENGIVNYKPVREKKGKELLENICDQ | |
| mDNMt31 at | NGSCKLATVDVGQNNPVAIGLFELKKVNGELTKTLISRHPTP | |
| positions 807-1021; | IDFCNKITAYRERYDKLESSIKLDAIKQLTSEQKIEVDNYNN | |
| linker at positions | NFTPQNTKQIVCSKLNINPNDLPWDKMISGTHFISEKAQVSN | |
| 1022-1041; KRAB | KSEIYFTSTDKGKTKDVMKSDYKWFQDYKPKLSKEVRDAL | |
| (ZNF10) at | SDIEWRLRRESLEFNKLSKSREQDARQLANWISSMCDVIGIQ | |
| positions 1042- | NLVKKNNFFGGSGKREPGWDNFYKPKKENRWWINAIHKAL | |
| 1116) | TELSQNKGKRVILLPAMRTSITCPKCKYCDSKNRNGEKFNC | |
| | LKCGIELNADIDVATENLATVAITAQSMPKPTCERSGDAKKP | |
| | VRARKAKAPEFHDKLAPSYTVVLREAVKRPAATKKAGQAK | |
| | KKKEFGGPSSGAPPPSGGSPAGSPTSTEEGTSESATPESGPGT | |
| | STEPSEGSAPGSPAGSMGPMEIYKTVSAWKRQPVRVLSLFR | |
| | NIDKVLKSLGFLESGSGSGGGTLKYVEDVTNVVRRDVEKW | |
| | GPFDLVYGSTQPLGSSCDRCPGWYMFQFHRILQYALPRQES | |
| | QRPFFWIFMDNLLLTEDDQETTTRFLQTEAVTLQDVRGRDY | |
| | QNAMRVWSNIPGLKSKHAPLTPKEEEYLQAQVRSRSKLDAP | |
| | KVDLLVKNCLLPLREYFKYFSQNSLPLGSPAGSPTSTEEGTS | |
| | ESATPMDAKSLTAWSRTLVTFKDVFVDFTREEWKLLDTAQ | |
| | QIVYRNVMLENYKNLVSLGYQLTKPDVILRLEKGEEPWLV | |
| dCasPhi12(L26K_I | MAPKKKRKVGIHGVPAAMIKPTVSQFLTPGFKLIRNHSRTA | 3016 |
| 471T_E567Q)- | GKKLKNEGEEACKKFVRENEIPKDECPNFQGGPAIANIIAKS | |
| mDnmt3l- | REFTEWEIYQSSLAIQEVIFTLPKDKLPEPILKEEWRAQWLSE | |
| KRAB(ZNF10) | HGLDTVPYKEAAGLNLIIKNAVNTYKGVQVKVDNKNKNNL | |
| (NLS at positions 1- | AKINRKNEIAKLNGEQEISFEEIKAFDDKGYLLQKPSPNKSIY | |
| 17; dCas at | CYQSVSPKPFITSKYHNVNLPEEYIGYYRKSNEPIVSPYQFDR | |
| positions 18-734; | LRIPIGEPGYVPKWQYTFLSKKENKRRKLSKRIKNVSPILGII | |
| NLS at positions | CIKKDWCVFDMRGLLRTNHWKKYHKPTDSINDLFDYFTGD | |
| 735-752; linker at | PVIDTKANVVRFRYKMENGIVNYKPVREKKGKELLENICDQ | |
| positions 753-806; | NGSCKLATVDVGQNNPVAIGLFELKKVNGELTKTLISRHPTP | |
| mDNMt31 at | IDFCNKITAYRERYDKLESSIKLDAIKQLTSEQKIEVDNYNN | |
| positions 807-1021; | NFTPQNTKQIVCSKLNINPNDLPWDKMTSGTHFISEKAQVSN | |
| linker at positions | KSEIYFTSTDKGKTKDVMKSDYKWFQDYKPKLSKEVRDAL | |
| 1022-1041; KRAB | SDIEWRLRRESLEFNKLSKSREQDARQLANWISSMCDVIGIQ | |
| (ZNF10) at | NLVKKNNFFGGSGKREPGWDNFYKPKKENRWWINAIHKAL | |
| positions 1042- | TELSQNKGKRVILLPAMRTSITCPKCKYCDSKNRNGEKFNC | |
| 1116) | LKCGIELNADIDVATENLATVAITAQSMPKPTCERSGDAKKP | |
| | VRARKAKAPEFHDKLAPSYTVVLREAVKRPAATKKAGQAK | |
| | KKKEFGGPSSGAPPPSGGSPAGSPTSTEEGTSESATPESGPGT | |
| | STEPSEGSAPGSPAGSMGPMEIYKTVSAWKRQPVRVLSLFR | |
| | NIDKVLKSLGFLESGSGSGGGTLKYVEDVTNVVRRDVEKW | |
| | GPFDLVYGSTQPLGSSCDRCPGWYMFQFHRILQYALPRQES | |
| | QRPFFWIFMDNLLLTEDDQETTTRFLQTEAVTLQDVRGRDY | |
| | QNAMRVWSNIPGLKSKHAPLTPKEEEYLQAQVRSRSKLDAP | |
| | KVDLLVKNCLLPLREYFKYFSQNSLPLGSPAGSPTSTEEGTS | |
| | ESATPMDAKSLTAWSRTLVTFKDVFVDFTREEWKLLDTAQ | |
| | QIVYRNVMLENYKNLVSLGYQLTKPDVILRLEKGEEPWLV | |
| dCasPhi12(L26R | MAPKKKRKVGIHGVPAAMIKPTVSQFLTPGFKLIRNHSRTA | 3017 |
| E567Q)-mDnmt31- | GRKLKNEGEEACKKFVRENEIPKDECPNFQGGPAIANIIAKS | |
| KRAB(ZNF10)- | REFTEWEIYQSSLAIQEVIFTLPKDKLPEPILKEEWRAQWLSE | |
| MPP8 | HGLDTVPYKEAAGLNLIIKNAVNTYKGVQVKVDNKNKNNL | |
| (NLS at positions 1- | AKINRKNEIAKLNGEQEISFEEIKAFDDKGYLLQKPSPNKSIY | |
| 17; dCas at | CYQSVSPKPFITSKYHNVNLPEEYIGYYRKSNEPIVSPYQFDR | |
| positions 18-734; | LRIPIGEPGYVPKWQYTFLSKKENKRRKLSKRIKNVSPILGII | |
| NLS at positions | CIKKDWCVFDMRGLLRTNHWKKYHKPTDSINDLFDYFTGD | |
| 735-752; linker at | PVIDTKANVVRFRYKMENGIVNYKPVREKKGKELLNICDQN | |
| positions 753-806; | GSCKLATVDVGQNNPVAIGLFELKKVNGELTKTLISRHPTPI | |
| mDNMt31 at | DFCNKITAYRERYDKLESSIKLDAIKQLTSEQKIEVDNYNNN | |
| positions 807-1021; | FTPQNTKQIVCSKLNINPNDLPWDKMISGTHFISEKAQVSNK | |
| linker at positions | SEIYFTSTDKGKTKDVMKSDYKWFQDYKPKLSKEVRDALS | |
| 1022-1041; KRAB | DIEWRLRRESLEFNKLSKSREQDARQLANWISSMCDVIGIQN | |
| (ZNF10) at | LVKKNNFGGSGKREPGWDNFYKPKKENRWWINAIHKALTE | |
| positions 1042- | LSQNKGKRVILLPAMRTSITCPKCKYCDSKNRNGEKFNCLK | |
| 1116; linker at | CGIELNADIDVATENLATVAITAQSMPKPTCERSGDAKKPV | |
| positions 1117- | RARKAKAPEFHDKLAPSYTVVLREAVKRPAATKKAGQAKK | |
| 1136; MPP8 at | KKEFGGPSSGAPPPSGGSPAGSPTSTEEGTSESATPESGPGTS | |
| positions 1137- | TEPSEGSAPGSPAGSMGPMEIYKTVSAWKRQPVRVLSLFRNI | |
| 1217) | DKVLKSLGFLESGSGSGGGTLKYVEDVTNVVRRDVEKWGP | |
| | FDLVYGSTQPLGSSCDRCPGWYMFQFHRILQYALPRQESQR | |
| | PFFWIFMDNLLLTEDDQETTTRFLQTEAVTLQDVRGRDYQN | |
| | AMRVWSNIPGLKSKHAPLTPKEEEYLQAQVRSRSKLDAPKV | |
| | DLLVKNCLLPLREYFKYFSQNSLPLGSPAGSPTSTEEGTSES | |
| | ATPMDAKSLTAWSRTLVTFKDVFVDFTREEWKLLDTAQQI | |
| | VYRNVMLENYKNLVSLGYQLTKPDVILRLEKGEEPWLVES | |
| | GPGTSTEPSEGSAPGSPAMAEAFGDSEEDGEDVFEVEKILD | |
| | MKTEGGKVLYKVRWKGYTSDDDTWEPEIHLEDCKEVLLEF | |
| | RKKIAENKAKAVRKDIQR | |
| dCasPhi12(L26R_ | MAPKKKRKVGIHGVPAAMIKPTVSQFLTPGFKLIRNHSRTA | 3018 |
| E567Q)-mDnmt3l- | GRKLKNEGEEACKKFVRENEIPKDECPNFQGGPAIANIIAKS | |
| CBX3VD- | REFTEWEIYQSSLAIQEVIFTLPKDKLPEPILKEEWRAQWLSE | |
| KRAB(ZIM3) | HGLDTVPYKEAAGLNLIIKNAVNTYKGVQVKVDNKNKNNL | |
| (NLS at positions 1- | AKINRKNEIAKLNGEQEISFEEIKAFDDKGYLLQKPSPNKSIY | |
| 17; dCas at | CYQSVSPKPFITSKYHNVNLPEEYIGYYRKSNEPIVSPYQFDR | |
| positions 18-734; | LRIPIGEPGYVPKWQYTFLSKKENKRRKLSKRIKNVSPILGII | |
| NLS at positions | CIKKDWCVFDMRGLLRTNHWKKYHKPTDSINDLFDYFTGD | |
| 735-752; linker at | PVIDTKANVVRFRYKMENGIVNYKPVREKKGKELLNICDQN | |
| positions 753-806; | GSCKLATVDVGQNNPVAIGLFELKKVNGELTKTLISRHPTPI | |
| mDNMt31 at | DFCNKITAYRERYDKLESSIKLDAIKQLTSEQKIEVDNYNNN | |
| positions 807-1021; | FTPQNTKQIVCSKLNINPNDLPWDKMISGTHFISEKAQVSNK | |
| linker at positions | SEIYFTSTDKGKTKDVMKSDYKWFQDYKPKLSKEVRDALS | |
| 1022-1041; | DIEWRLRRESLEFNKLSKSREQDARQLANWISSMCDVIGIQN | |
| CBX3VD at | LVKKNNFFGGSGKREPGWDNFYKPKKENRWWINAIHKALT | |
| positions 1042- | ELSQNKGKRVILLPAMRTSITCPKCKYCDSKNRNGEKFNCL | |
| 1101; linker at | KCGIELNADIDVATENLATVAITAQSMPKPTCERSGDAKKP | |
| positions 1102- | VRARKAKAPEFHDKLAPSYTVVLREAVKRPAATKKAGQAK | |
| 1114; KRAB | KKKEFGGPSSGAPPPSGGSPAGSPTSTEEGTSESATPESGPGT | |
| (ZIM3) at positions | STEPSEGSAPGSPAGSMGPMEIYKTVSAWKRQPVRVLSLFR | |
| 1115-1214) | NIDKVLKSLGFLESGSGSGGGTLKYVEDVTNVVRRDVEKW | |
| | GPFDLVYGSTQPLGSSCDRCPGWYMFQFHRILQYALPRQES | |
| | QRPFFWIFMDNLLLTEDDQETTTRFLQTEAVTLQDVRGRDY | |
| | QNAMRVWSNIPGLKSKHAPLTPKEEEYLQAQVRSRSKLDAP | |
| | KVDLLVKNCLLPLREYFKYFSQNSLPLGSPAGSPTSTEEGTS | |
| | ESATPMEEAEPDEFVVEKVLDRRVVNGKVEYFLKWEGFTD | |
| | ADNTWEPEENLDCPELIEAFLNSQKSRSSGGGSGGSGSMNN | |
| | SQGRVTFEDVTVNFTQGEWQRLNPEQRNLYRDVMLENYSN | |
| | LVSVGQGETTKPDVILRLEQGKEPWLEEEEVLGSGRAEKNG | |
| | DIGGQIWKPKDVKESL | |
| dCasPhi12(L26R | MAPKKKRKVGIHGVPAAMIKPTVSQFLTPGFKLIRNHSRTA | 3019 |
| E567Q)-mDnmt3l- | GRKLKNEGEEACKKFVRENEIPKDECPNFQGGPAIANIIAKS | |
| CBX5VD- | REFTEWEIYQSSLAIQEVIFTLPKDKLPEPILKEEWRAQWLSE | |
| KRAB(ZIM3) | HGLDTVPYKEAAGLNLIIKNAVNTYKGVQVKVDNKNKNNL | |
| (NLS at positions 1- | AKINRKNEIAKLNGEQEISFEEIKAFDDKGYLLQKPSPNKSIY | |
| 17; dCas at | CYQSVSPKPFITSKYHNVNLPEEYIGYYRKSNEPIVSPYQFDR | |
| positions 18-734; | LRIPIGEPGYVPKWQYTFLSKKENKRRKLSKRIKNVSPILGII | |
| NLS at positions | CIKKDWCVFDMRGLLRTNHWKKYHKPTDSINDLFDYFTGD | |
| 735-752; linker at | PVIDTKANVVRFRYKMENGIVNYKPVREKKGKELLENICDQ | |
| positions 753-806; | NGSCKLATVDVGQNNPVAIGLFELKKVNGELTKTLISRHPTP | |
| mDNMt31 at | IDFCNKITAYRERYDKLESSIKLDAIKQLTSEQKIEVDNYNN | |
| positions 807-1021; | NFTPQNTKQIVCSKLNINPNDLPWDKMISGTHFISEKAQVSN | |
| linker at positions | KSEIYFTSTDKGKTKDVMKSDYKWFQDYKPKLSKEVRDAL | |
| 1022-1041; | SDIEWRLRRESLEFNKLSKSREQDARQLANWISSMCDVIGIQ | |
| CBX5VD at | NLVKKNNFFGGSGKREPGWDNFYKPKKENRWWINAIHKAL | |
| positions 1042- | TELSQNKGKRVILLPAMRTSITCPKCKYCDSKNRNGEKFNC | |
| 1104; linker at | LKCGIELNADIDVATENLATVAITAQSMPKPTCERSGDAKKP | |
| positions 1105- | VRARKAKAPEFHDKLAPSYTVVLREAVKRPAATKKAGQAK | |
| 1117; KRAB | KKKEFGGPSSGAPPPSGGSPAGSPTSTEEGTSESATPESGPGT | |
| (ZIM3) at positions | STEPSEGSAPGSPAGSMGPMEIYKTVSAWKRQPVRVLSLFR | |
| 1118-1217) | NIDKVLKSLGFLESGSGSGGGTLKYVEDVTNVVRRDVEKW | |
| | GPFDLVYGSTQPLGSSCDRCPGWYMFQFHRILQYALPRQES | |
| | QRPFFWIFMDNLLLTEDDQETTTRFLQTEAVTLQDVRGRDY | |
| | QNAMRVWSNIPGLKSKHAPLTPKEEEYLQAQVRSRSKLDAP | |
| | KVDLLVKNCLLPLREYFKYFSQNSLPLGSPAGSPTSTEEGTS | |
| | ESATPMEDEYVVEKVLDRRVVKGQVEYLLKWEGFSEEHNT | |
| | WEPEKNLDCPELISEFMKKYKKMKEGENSRSSGGGSGGSGS | |
| | MNNSQGRVTFEDVTVNFTQGEWQRLNPEQRNLYRDVMLE | |
| | NYSNLVSVGQGETTKPDVILRLEQGKEPWLEEEEVLGSGRA | |
| | EKNGDIGGQIWKPKDVKESL | |
| dCasPhi12(E567Q) | MAPKKKRKVGIHGVPAAMIKPTVSQFLTPGFKLIRNHSRTA | 3020 |
| -mDnmt3l- | GLKLKNEGEEACKKFVRENEIPKDECPNFQGGPAIANIIAKS | |
| KRAB(ZNF10) | REFTEWEIYQSSLAIQEVIFTLPKDKLPEPILKEEWRAQWLSE | |
| (NLS at positions 1- | HGLDTVPYKEAAGLNLIIKNAVNTYKGVQVKVDNKNKNNL | |
| 17; dCas at | AKINRKNEIAKLNGEQEISFEEIKAFDDKGYLLQKPSPNKSIY | |
| positions 18-734; | CYQSVSPKPFITSKYHNVNLPEEYIGYYRKSNEPIVSPYQFDR | |
| NLS at positions | LRIPIGEPGYVPKWQYTFLSKKENKRRKLSKRIKNVSPILGII | |
| 735-752; linker at | CIKKDWCVFDMRGLLRTNHWKKYHKPTDSINDLFDYFTGD | |
| positions 753-806; | PVIDTKANVVRFRYKMENGIVNYKPVREKKGKELLENICDQ | |
| mDNMt31 at | NGSCKLATVDVGQNNPVAIGLFELKKVNGELTKTLISRHPTP | |
| positions 807-1021; | IDFCNKITAYRERYDKLESSIKLDAIKQLTSEQKIEVDNYNN | |
| linker at positions | NFTPQNTKQIVCSKLNINPNDLPWDKMISGTHFISEKAQVSN | |
| 1022-1041; KRAB | KSEIYFTSTDKGKTKDVMKSDYKWFQDYKPKLSKEVRDAL | |
| (ZNF10) at | SDIEWRLRRESLEFNKLSKSREQDARQLANWISSMCDVIGIQ | |
| positions 1042- | NLVKKNNFFGGSGKREPGWDNFYKPKKENRWWINAIHKAL | |
| 1116) | TELSQNKGKRVILLPAMRTSITCPKCKYCDSKNRNGEKNCL | |
| | KCGIELNADIDVATENLATVAITAQSMPKPTCERSGDAKKP | |
| | VRARKAKAPEFHDKLAPSYTVVLREAVKRPAATKKAGQAK | |
| | KKKEFGGPSSGAPPPSGGSPAGSPTSTEEGTSESATPESGPGT | |
| | STEPSEGSAPGSPAGSMGPMEIYKTVSAWKRQPVRVLSLFR | |
| | NIDKVLKSLGFLESGSGSGGGTLKYVEDVTNVVRRDVEKW | |
| | GPFDLVYGSTQPLGSSCDRCPGWYMFQFHRILQYALPRQES | |
| | QRPFFWIFMDNLLLTEDDQETTTRFLQTEAVTLQDVRGRDY | |
| | QNAMRVWSNIPGLKSKHAPLTPKEEEYLQAQVRSRSKLDAP | |
| | KVDLLVKNCLLPLREYFKYFSQNSLPLGSPAGSPTSTEEGTS | |
| | ESATPMDAKSLTAWSRTLVTFKDVFVDFTREEWKLLDTAQ | |
| | QIVYRNVMLENYKNLVSLGYQLTKPDVILRLEKGEEPWLV | |
| dCasPhi12(L26R_ | MAPKKKRKVGIHGVPAAMIKPTVSQFLTPGFKLIRNHSRTA | 3021 |
| E567Q)-mDnmt3l- | GRKLKNEGEEACKKFVRENEIPKDECPNFQGGPAIANIIAKS | |
| KRAB(ZNF10) | REFTEWEIYQSSLAIQEVIFTLPKDKLPEPILKEEWRAQWLSE | |
| (codon | HGLDTVPYKEAAGLNLIIKNAVNTYKGVQVKVDNKNKNNL | |
| optimization) | AKINRKNEIAKLNGEQEISFEEIKAFDDKGYLLQKPSPNKSIY | |
| variant 2 | CYQSVSPKPFITSKYHNVNLPEEYIGYYRKSNEPIVSPYQFDR | |
| (NLS at positions 1- | LRIPIGEPGYVPKWQYTFLSKKENKRRKLSKRIKNVSPILGII | |
| 17; dCas at | CIKKDWCVFDMRGLLRTNHWKKYHKPTDSINDLFDYFTGD | |
| positions 18-734; | PVIDTKANVVRFRYKMENGIVNYKPVREKKGKELLENICDQ | |
| NLS at positions | NGSCKLATVDVGQNNPVAIGLFELKKVNGELTKTLISRHPTP | |
| 735-752; linker at | IDFCNKITAYRERYDKLESSIKLDAIKQLTSEQKIEVDNYNN | |
| positions 753-806; | NFTPQNTKQIVCSKLNINPNDLPWDKMISGTHFISEKAQVSN | |
| mDNMt31 at | KSEIYFTSTDKGKTKDVMKSDYKWFQDYKPKLSKEVRDAL | |
| positions 807-1021; | SDIEWRLRRESLEFNKLSKSREQDARQLANWISSMCDVIGIQ | |
| KRAB (ZNF10) at | NLVKKNNFFGGSGKREPGWDNFYKPKKENRWWINAIHKAL | |
| positions 1022- | TELSQNKGKRVILLPAMRTSITCPKCKYCDSKNRNGEKFNC | |
| 1096) | LKCGIELNADIDVATENLATVAITAQSMPKPTCERSGDAKKP | |
| | VRARKAKAPEFHDKLAPSYTVVLREAVKRPAATKKAGQAK | |
| | KKKEFGGPSSGAPPPSGGSPAGSPTSTEEGTSESATPESGPGT | |
| | STEPSEGSAPGSPAGSMGPMEIYKTVSAWKRQPVRVLSLFR | |
| | NIDKVLKSLGFLESGSGSGGGTLKYVEDVTNVVRRDVEKW | |
| | GPFDLVYGSTQPLGSSCDRCPGWYMFQFHRILQYALPRQES | |
| | QRPFFWIFMDNLLLTEDDQETTTRFLQTEAVTLQDVRGRDY | |
| | QNAMRVWSNIPGLKSKHAPLTPKEEEYLQAQVRSRSKLDAP | |
| | KVDLLVKNCLLPLREYFKYFSQNSLPLMDAKSLTAWSRTLV | |
| | TFKDVFVDFTREEWKLLDTAQQIVYRNVMLENYKNLVSLG | |
| | YQLTKPDVILRLEKGEEPWLV | |
| dCasPhi12(L26K_I | MAPKKKRKVGIHGVPAAMIKPTVSQFLTPGFKLIRNHSRTA | 3022 |
| 471T_E567Q)- | GKKLKNEGEEACKKFVRENEIPKDECPNFQGGPAIANIIAKS | |
| mDnmt3l- | REFTEWEIYQSSLAIQEVIFTLPKDKLPEPILKEEWRAQWLSE | |
| KRAB(ZIM3) | HGLDTVPYKEAAGLNLIIKNAVNTYKGVQVKVDNKNKNNL | |
| (NLS at positions 1- | AKINRKNEIAKLNGEQEISFEEIKAFDDKGYLLQKPSPNKSIY | |
| 17; dCas at | CYQSVSPKPFITSKYHNVNLPEEYIGYYRKSNEPIVSPYQFDR | |
| positions 18-734; | LRIPIGEPGYVPKWQYTFLSKKENKRRKLSKRIKNVSPILGII | |
| NLS at positions | CIKKDWCVFDMRGLLRTNHWKKYHKPTDSINDLFDYFTGD | |
| 735-752; linker at | PVIDTKANVVRFRYKMENGIVNYKPVREKKGKELLENICDQ | |
| positions 753-806; | NGSCKLATVDVGQNNPVAIGLFELKKVNGELTKTLISRHPTP | |
| mDNMt31 at | IDFCNKITAYRERYDKLESSIKLDAIKQLTSEQKIEVDNYNN | |
| positions 807-1021; | NFTPQNTKQIVCSKLNINPNDLPWDKMTSGTHFISEKAQVSN | |
| linker at positions | KSEIYFTSTDKGKTKDVMKSDYKWFQDYKPKLSKEVRDAL | |
| 1022-1041; KRAB | SDIEWRLRRESLEFNKLSKSREQDARQLANWISSMCDVIGIQ | |
| (ZIM3) at positions | NLVKKNNFFGGSGKREPGWDNFYKPKKENRWWINAIHKAL | |
| 1042-1141) | TELSQNKGKRVILLPAMRTSITCPKCKYCDSKNRNGEKFNC | |
| | LKCGIELNADIDVATENLATVAITAQSMPKPTCERSGDAKKP | |
| | VRARKAKAPEFHDKLAPSYTVVLREAVKRPAATKKAGQAK | |
| | KKKEFGGPSSGAPPPSGGSPAGSPTSTEEGTSESATPESGPGT | |
| | STEPSEGSAPGSPAGSMGPMEIYKTVSAWKRQPVRVLSLFR | |
| | NIDKVLKSLGFLESGSGSGGGTLKYVEDVTNVVRRDVEKW | |
| | GPFDLVYGSTQPLGSSCDRCPGWYMFQFHRILQYALPRQES | |
| | QRPFFWIFMDNLLLTEDDQETTTRFLQTEAVTLQDVRGRDY | |
| | QNAMRVWSNIPGLKSKHAPLTPKEEEYLQAQVRSRSKLDAP | |
| | KVDLLVKNCLLPLREYFKYFSQNSLPLGSPAGSPTSTEEGTS | |
| | ESATPMNNSQGRVTFEDVTVNFTQGEWQRLNPEQRNLYRD | |
| | VMLENYSNLVSVGQGETTKPDVILRLEQGKEPWLEEEEVLG | |
| | SGRAEKNGDIGGQIWKPKDVKESL | |
| dCasPhi12(L26K_I | MAPKKKRKVGIHGVPAAMIKPTVSQFLTPGFKLIRNHSRTA | 3023 |
| 471T_E567Q)- | GKKLKNEGEEACKKFVRENEIPKDECPNFQGGPAIANIIAKS | |
| mDnmt31- | REFTEWEIYQSSLAIQEVIFTLPKDKLPEPILKEEWRAQWLSE | |
| KRAB(ZNF10)- | HGLDTVPYKEAAGLNLIIKNAVNTYKGVQVKVDNKNKNNL | |
| MPP8 | AKINRKNEIAKLNGEQEISFEEIKAFDDKGYLLQKPSPNKSIY | |
| (NLS at positions 1- | CYQSVSPKPFITSKYHNVNLPEEYIGYYRKSNEPIVSPYQFDR | |
| 17; dCas at | LRIPIGEPGYVPKWQYTFLSKKENKRRKLSKRIKNVSPILGII | |
| positions 18-734; | CIKKDWCVFDMRGLLRTNHWKKYHKPTDSINDLFDYFTGD | |
| NLS at positions | PVIDTKANVVRFRYKMENGIVNYKPVREKKGKELLENICDQ | |
| 735-752; linker at | NGSCKLATVDVGQNNPVAIGLFELKKVNGELTKTLISRHPTP | |
| positions 753-806; | IDFCNKITAYRERYDKLESSIKLDAIKQLTSEQKIEVDNYNN | |
| mDNMt31 at | NFTPQNTKQIVCSKLNINPNDLPWDKMTSGTHFISEKAQVSN | |
| positions 807-1021; | KSEIYFTSTDKGKTKDVMKSDYKWFQDYKPKLSKEVRDAL | |
| linker at positions | SDIEWRLRRESLEFNKLSKSREQDARQLANWISSMCDVIGIQ | |
| 1022-1041; KRAB | NLVKKNNFFGGSGKREPGWDNFYKPKKENRWWINAIHKAL | |
| (ZNF10) at | TELSQNKGKRVILLPAMRTSITCPKCKYCDSKNRNGEKFNC | |
| positions 1042- | LKCGIELNADIDVATENLATVAITAQSMPKPTCERSGDAKKP | |
| 1116; linker at | VRARKAKAPEFHDKLAPSYTVVLREAVKRPAATKKAGQAK | |
| positions 1117- | KKKEFGGPSSGAPPPSGGSPAGSPTSTEEGTSESATPESGPGT | |
| 1136; MPP8 at | STEPSEGSAPGSPAGMGPMEIYKTVSAWKRQPVRVLSLFRNI | |
| positions 1137- | DKVLKSLGFLESGSGSGGGTLKYVEDVTNVVRRDVEKWGP | |
| 1217) | FDLVYGSTQPLGSSCDRCPGWYMFQFHRILQYALPRQESQR | |
| | PFFWIFMDNLLLTEDDQETTTRFLQTEAVTLQDVRGRDYQN | |
| | AMRVWSNIPGLKSKHAPLTPKEEEYLQAQVRSRSKLDAPKV | |
| | DLLVKNCLLPLREYFKYFSQNSLPLGSPAGSPTSTEEGTSES | |
| | ATPMDAKSLTAWSRTLVTFKDVFVDFTREEWKLLDTAQQI | |
| | VYRNVMLENYKNLVSLGYQLTKPDVILRLEKGEEPWLVES | |
| | GPGTSTEPSEGSAPGSPAMAEAFGDSEEDGEDVFEVEKILD | |
| | MKTEGGKVLYKVRWKGYTSDDDTWEPEIHLEDCKEVLLEF | |
| | RKKIAENKAKAVRKDIQR | |
| dCasPhi12(L26K_I | MAPKKKRKVGIHGVPAAMIKPTVSQFLTPGFKLIRNHSRTA | 3024 |
| 471T_E567Q)- | GKKLKNEGEEACKKFVRENEIPKDECPNFQGGPAIANIIAKS | |
| mDnmt3l- | REFTEWEIYQSSLAIQEVIFTLPKDKLPEPILKEEWRAQWLSE | |
| CBX3VD- | HGLDTVPYKEAAGLNLIIKNAVNTYKGVQVKVDNKNKNNL | |
| KRAB(ZIM3) | AKINRKNEIAKLNGEQEISFEEIKAFDDKGYLLQKPSPNKSIY | |
| (NLS at positions 1- | CYQSVSPKPFITSKYHNVNLPEEYIGYYRKSNEPIVSPYQFDR | |
| 17; dCas at | LRIPIGEPGYVPKWQYTFLSKKENKRRKLSKRIKNVSPILGII | |
| positions 18-734; | CIKKDWCVFDMRGLLRTNHWKKYHKPTDSINDLFDYFTGD | |
| NLS at positions | PVIDTKANVVRFRYKMENGIVNYKPVREKKGKELLENICDQ | |
| 735-752; linker at | NGSCKLATVDVGQNNPVAIGLFELKKVNGELTKTLISRHPTP | |
| positions 753-806; | IDFCNKITAYRERYDKLESSIKLDAIKQLTSEQKIEVDNYNN | |
| mDNMt31 at | NFTPQNTKQIVCSKLNINPNDLPWDKMTSGTHFISEKAQVSN | |
| positions 807-1021; | KSEIYFTSTDKGKTKDVMKSDYKWFQDYKPKLSKEVRDAL | |
| linker at positions | SDIEWRLRRESLEFNKLSKSREQDARQLANWISSMCDVIGIQ | |
| 1022-1041; | NLVKKNNFFGGSGKREPGWDNFYKPKKENRWWINAIHKAL | |
| CBX3VD at | TELSQNKGKRVILLPAMRTSITCPKCKYCDSKNRNGEKFNC | |
| positions 1042- | LKCGIELNADIDVATENLATVAITAQSMPKPTCERSGDAKKP | |
| 1101; linker at | VRARKAKAPEFHDKLAPSYTVVLREAVKRPAATKKAGQAK | |
| positions 1102- | KKKEFGGPSSGAPPPSGGSPAGSPTSTEEGTSESATPESGPGT | |
| 1114; KRAB | STEPSEGSAPGSPAGSMGPMEIYKTVSAWKRQPVRVLSLFR | |
| (ZIM3) at positions | NIDKVLKSLGFLESGSGSGGGTLKYVEDVTNVVRRDVEKW | |
| 1115-1214) | GPFDLVYGSTQPLGSSCDRCPGWYMFQFHRILQYALPRQES | |
| | QRPFFWIFMDNLLLTEDDQETTTRFLQTEAVTLQDVRGRDY | |
| | QNAMRVWSNIPGLKSKHAPLTPKEEEYLQAQVRSRSKLDAP | |
| | KVDLLVKNCLLPLREYFKYFSQNSLPLGSPAGSPTSTEEGTS | |
| | ESATPMEEAEPDEFVVEKVLDRRVVNGKVEYFLKWEGFTD | |
| | ADNTWEPEENLDCPELIEAFLNSQKSRSSGGGSGGSGSMNN | |
| | SQGRVTFEDVTVNFTQGEWQRLNPEQRNLYRDVMLENYSN | |
| | LVSVGQGETTKPDVILRLEQGKEPWLEEEEVLGSGRAEKNG | |
| | DIGGQIWKPKDVKESL | |
| dCasPhi12(L26K_I | MAPKKKRKVGIHGVPAAMIKPTVSQFLTPGFKLIRNHSRTA | 3025 |
| 471T_E567Q)- | GKKLKNEGEEACKKFVRENEIPKDECPNFQGGPAIANIIAKS | |
| mDnmt3l- | REFTEWEIYQSSLAIQEVIFTLPKDKLPEPILKEEWRAQWLSE | |
| CBX5VD- | HGLDTVPYKEAAGLNLIIKNAVNTYKGVQVKVDNKNKNNL | |
| KRAB(ZIM3) | AKINRKNEIAKLNGEQEISFEEIKAFDDKGYLLQKPSPNKSIY | |
| (NLS at positions 1- | CYQSVSPKPFITSKYHNVNLPEEYIGYYRKSNEPIVSPYQFDR | |
| 17; dCas at | LRIPIGEPGYVPKWQYTFLSKKENKRRKLSKRIKNVSPILGII | |
| positions 18-734; | CIKKDWCVFDMRGLLRTNHWKKYHKPTDSINDLFDYFTGD | |
| NLS at positions | PVIDTKANVVRFRYKMENGIVNYKPVREKKGKELLENICDQ | |
| 735-752; linker at | NGSCKLATVDVGQNNPVAIGLFELKKVNGELTKTLISRHPTP | |
| positions 753-806; | IDFCNKITAYRERYDKLESSIKLDAIKQLTSEQKIEVDNYNN | |
| mDNMt31 at | NFTPQNTKQIVCSKLNINPNDLPWDKMTSGTHFISEKAQVSN | |
| positions 807-1021; | KSEIYFTSTDKGKTKDVMKSDYKWFQDYKPKLSKEVRDAL | |
| linker at positions | SDIEWRLRRESLEFNKLSKSREQDARQLANWISSMCDVIGIQ | |
| 1022-1041; | NLVKKNNFFGGSGKREPGWDNFYKPKKENRWWINAIHKAL | |
| CBX5VD at | TELSQNKGKRVILLPAMRTSITCPKCKYCDSKNRNGEKFNC | |
| positions 1042- | LKCGIELNADIDVATENLATVAITAQSMPKPTCERSGDAKKP | |
| 1104; linker at | VRARKAKAPEFHDKLAPSYTVVLREAVKRPAATKKAGQAK | |
| positions 1105- | KKKEFGGPSSGAPPPSGGSPAGSPTSTEEGTSESATPESGPGT | |
| 1117; KRAB | STEPSEGSAPGSPAGSMGPMEIYKTVSAWKRQPVRVLSLFR | |
| (ZIM3) at positions | NIDKVLKSLGFLESGSGSGGGTLKYVEDVTNVVRRDVEKW | |
| 1118-1217) | GPFDLVYGSTQPLGSSCDRCPGWYMFQFHRILQYALPRQES | |
| | QRPFFWIFMDNLLLTEDDQETTTRFLQTEAVTLQDVRGRDY | |
| | QNAMRVWSNIPGLKSKHAPLTPKEEEYLQAQVRSRSKLDAP | |
| | KVDLLVKNCLLPLREYFKYFSQNSLPLGSPAGSPTSTEEGTS | |
| | ESATPMEDEYVVEKVLDRRVVKGQVEYLLKWEGFSEEHNT | |
| | WEPEKNLDCPELISEFMKKYKKMKEGENSRSSGGGSGGSGS | |
| | MNNSQGRVTFEDVTVNFTQGEWQRLNPEQRNLYRDVMLE | |
| | NYSNLVSVGQGETTKPDVILRLEQGKEPWLEEEEVLGSGRA | |
| | EKNGDIGGQIWKPKDVKESL | |

Exemplary Guide Nucleic Acids

| | | |
|---|---|---|
| gKD010 | AUUGCUCCUUACGAGGAGACCGGUCAGAGGGACAGAGA | 2937 |
| | CC | |
| gKD033 | AUUGCUCCUUACGAGGAGACGAGAGAGGCCCAGCUACU | 2940 |
| | CG | |

### Example 8. CasPhi.12 Variant Fusion Silences Native Genes in HEK293T by Targeting Endogenous Promoters

[0379] CasPhi.12 repressor fusion CasPhi^{L26K/E567Q}-mDnmt3l-KRAB^{ZNF10}, gRNA & controls were delivered to HEK293T cells by plasmid transfection without selection. gRNAs for CasPhi^{L26K/E567Q}-mDnmt3l-KRAB^{ZNF10} and controls were designed to target the promoter regions for human genes, MAPT, SNCA, BRCA1, and CXCR4. Guide RNA sequences are shown in TABLE 20 (repeat sequence italicized, spacer sequence not italicized). CasPhi^{L26K/E567Q}-mDnmt3l-KRAB^{ZNF10} activity was measured 7 days and 30 days post-transfection using RT-qPCR to quantify relative mRNA levels of each gene and normalized with GAPDH to the non-target control. FIG. 16A shows results at 7 days and FIG. 16B shows results at 30 days. CasPhi^{L26K/E567Q}-mDnmt3l-KRAB^{ZNF10} demonstrates Cas9 equivalence for some of the gRNAs tested. It is worth noting that, unlike Cas9, these CasPhi^{L26K/E567Q}-mDnmt3l-KRABZ^{NF10} and guides are capable of fitting into a single AAV vector. TABLE 19 provides exemplary guide RNAs sequences paired with CasPhi.12 fusions and variants thereof for targeting endogenous promoters.

TABLE 19
Exemplary guide RNAs for CasPhi.12 fusions and variants thereof

| | | SEQ |
|---|---|---|
| gRNA ID | Guide RNA Sequences | ID NO: |
| gSNCA-1 | CUUUCAAGACUAAUAGAUUGCUCCUUACGAGGAGACGUCAGCG | 3026 |
| | CUUCUGCCCGCCC | |
| gSNCA-2 | CUUUCAAGACUAAUAGAUUGCUCCUUACGAGGAGACUCCUCGG | 3027 |
| | CUCUCCGCCCCCA | |
| gSNCA-3 | CUUUCAAGACUAAUAGAUUGCUCCUUACGAGGAGACGGCCCCU | 3028 |
| | UCUGGUCGUCGCC | |
| gSNCA-4 | CUUUCAAGACUAAUAGAUUGCUCCUUACGAGGAGACCGCGUCG | 3029 |
| | CGGCGCUCGGUCG | |
| gSNCA-5 | CUUUCAAGACUAAUAGAUUGCUCCUUACGAGGAGACAAGGCAA | 3030 |
| | GGCGUGAGGGAGC | |
| gSNCA-6 | CUUUCAAGACUAAUAGAUUGCUCCUUACGAGGAGACCCACCCU | 3031 |
| | CGUGAGCGGAGAA | |
| gSNCA-7 | CUUUCAAGACUAAUAGAUUGCUCCUUACGAGGAGACUCCGCUC | 3032 |
| | ACGAGGGUGGAAA | |
| gSNCA-8 | CUUUCAAGACUAAUAGAUUGCUCCUUACGAGGAGACGCGGGUU | 3033 |
| | UGCCUCCCACUCC | |
| gSNCA-dCas9 | GCUCCUCCUUCUCCUUCUCCUGUUUAAGAGCUAUGCUGGAA | 3034 |
| | ACAGCAUAGCAAGUUUAAAUAAGGCUAGUCCGUUAUCAACU | |
| | UGAAAAAGUGGCACCGAGUCGGUGC | |
| gMAPT-1 | CUUUCAAGACUAAUAGAUUGCUCCUUACGAGGAGACCUGAGGC | 3035 |
| | CGGCGGGCGGCGC | |
| gMAPT-2 | CUUUCAAGACUAAUAGAUUGCUCCUUACGAGGAGACGCCGGCG | 3036 |
| | CGCGCCCUCGCAG | |
| gMAPT-3 | CUUUCAAGACUAAUAGAUUGCUCCUUACGAGGAGACGUGCCGG | 3037 |
| | AGCUGGUGGGUGG | |
| gMAPT-4 | CUUUCAAGACUAAUAGAUUGCUCCUUACGAGGAGACUGCCGCC | 3038 |
| | GCCACCACAGCCA | |
| gMAPT-5 | CUUUCAAGACUAAUAGAUUGCUCCUUACGAGGAGACUCCUCCU | 3039 |
| | CCGCUGUCCUCUC | |
| gMAPT-6 | CUUUCAAGACUAAUAGAUUGCUCCUUACGAGGAGACCCUGAUA | 3040 |
| | GUCGACAGAGGCG | |
| gMAPT-7 | CUUUCAAGACUAAUAGAUUGCUCCUUACGAGGAGACGGAGCCG | 3041 |
| | CGGCGCUUACCUG | |
| gMAPT-8 | CUUUCAAGACUAAUAGAUUGCUCCUUACGAGGAGACGUGCGCC | 3042 |
| | GGGCAUCGGUCGG | |
| gMAPT- | GCGAAGAGGGCGCGUUCCUGGUUUAAGAGCUAUGCUGGAAA | 3043 |
| dCas9 | CAGCAUAGCAAGUUUAAAUAAGGCUAGUCCGUUAUCAACUU | |
| | GAAAAAGUGGCACCGAGUCGGUGC | |
| gCXCR4-1 | CUUUCAAGACUAAUAGAUUGCUCCUUACGAGGAGACAUAAAAA | 3044 |
| | CACGCUCCGAGCG | |
| gCXCR4-2 | CUUUCAAGACUAAUAGAUUGCUCCUUACGAGGAGACUAUAAAA | 3045 |
| | GUCCGGCCGCGGC | |
| gCXCR4-3 | CUUUCAAGACUAAUAGAUUGCUCCUUACGAGGAGACCUGGCCG | 3046 |
| | CGGCCGGACUUUU | |
| gCXCR4-4 | CUUUCAAGACUAAUAGAUUGCUCCUUACGAGGAGACUUGGCUG | 3047 |
| | CGGCAGCAGGUAG | |
| gCXCR4-5 | CUUUCAAGACUAAUAGAUUGCUCCUUACGAGGAGACCUACCUG | 3048 |
| | CUGCCGCAGCCAA | |
| gCXCR4-6 | CUUUCAAGACUAAUAGAUUGCUCCUUACGAGGAGACCCAUGGA | 3049 |
| | GGGGAUCAGUGUA | |
| gCXCR4-7 | CUUUCAAGACUAAUAGAUUGCUCCUUACGAGGAGACAACUUAG | 3050 |
| | AGCGCAGCCCCUC | |
| gCXCR4-8 | CUUUCAAGACUAAUAGAUUGCUCCUUACGAGGAGACGGAGUAC | 3051 |
| | GGGUACCUCCAAU | |
| gCXCR4- | GCAGGUAGCAAAGUGACGCCGAGUUUAAGAGCUAUGCUGGA | 3052 |
| dCas9 | AACAGCAUAGCAAGUUUAAAUAAGGCUAGUCCGUUAUCAAC | |
| | UUGAAAAAGUGGCACCGAGUCGGUGC | |
| gBRCA1-1 | CUUUCAAGACUAAUAGAUUGCUCCUUACGAGGAGACCGUGGCA | 3053 |
| | ACGGAAAAGCGCG | |
| gBRCA1-2 | CUUUCAAGACUAAUAGAUUGCUCCUUACGAGGAGACAUUUAUC | 3054 |
| | UGUAAUUCCCGCG | |
| gBRCA1-3 | CUUUCAAGACUAAUAGAUUGCUCCUUACGAGGAGACAAACUGC | 3055 |
| | GACUGCGCGGCGU | |
| gBRCA1-4 | CUUUCAAGACUAAUAGAUUGCUCCUUACGAGGAGACCUGGACG | 3056 |
| | GGGGACAGGCUGU | |
| gBRCA1-5 | CUUUCAAGACUAAUAGAUUGCUCCUUACGAGGAGACUCAGAUA | 3057 |
| | ACUGGGCCCCUGC | |
| gBRCA1-6 | CUUUCAAGACUAAUAGAUUGCUCCUUACGAGGAGACCCCAGAG | 3058 |
| | CAGAGGGUGAAGG | |
| gBRCA1-7 | CUUUCAAGACUAAUAGAUUGCUCCUUACGAGGAGACCCGGGAC | 3059 |
| | UCUACUACCUUUA | |
| gBRCA1-8 | CUUUCAAGACUAAUAGAUUGCUCCUUACGAGGAGACCGAAGCU | 3060 |
| | GACAGAUGGGUAU | |
| | GGCUCGCUGAGACUUCCUGGAGUUUAAGAGCUAUGCUGGAA | 3061 |
| gBRCA1- | ACAGCAUAGCAAGUUUAAAUAAGGCUAGUCCGUUAUCAACU | |
| dCas9 | UGAAAAAGUGGCACCGAGUCGGUGC | |

### Example 9. Pooling Guides can have Additive Effect on dCasPhi.12 Mediated Gene Repression

[0380] A HEK293T GFP reporter line was seeded at 30K cells/well in 96 well plates. 24 hours later, cells were transfected with 150 ng of effector protein (dCasPhi12(L26R_E567Q)-D3L-CBX3VD-KRAB(ZIM3) (SEQ ID NO: 3024)) encoding plasmid and 150 ng of plasmid encoding gRNA(s). Puromycin selection was conducted 48 hrs post transfection. Cells were passaged every 3-4 days, and flow cytometry readout obtained every 3-7 days. Flow cytometry readout gating was performed for live, single cells, and % repression gated against early day5/day9 dcas9+non targeting guide. Measurements at day 63 are shown in FIGS. 17A and 17B for two different guide poolings. Guides in the legend from top to bottom correspond to data points shown in the graph from left to right (gKD010 (SEQ ID NO: 2937), gTR079 (SEQ ID NO: 2942), gKD015 (SEQ ID NO: 2938), gKD027 (SEQ ID NO: 2939) and gKD033 (SEQ ID NO: 2940)).

### Example 10. DCasPhi.12 Fusion Constructs for Gene Silencing

[0381] A HEK293T GFP reporter line was seeded at 30K cells/well in 96 well plates. 24 hours later, cells were transfected with 150 ng of effector protein fusion protein encoding plasmid and 150 ng of plasmid encoding gRNA(s). Sequences of these fusion proteins are described in Example 7:dCasPhi12(E567Q)-D3L-KRAB(ZNF10) (SEQ ID NO: 3020), dCasPhi12(L26R_E567Q)-D3L-KRAB(ZNF10) (SEQ ID NO: 3021), dCasPhi12(L26K_I471T_E567Q)-D3L-KRAB(ZIM3) (SEQ ID NO: 3022), dCasPhi12(L26K_I471T_E567Q)-D3L-KRAB(ZNF10)-MPP8 (SEQ ID NO: 3023), dCasPhi12(L26K_I471T_E567Q)-D3L-CBX3VD-KRAB(ZIM3) (SEQ ID NO: 3024), and dCasPhi12(L26K_I471T_E567Q)-D3L-CBX5VD-KRAB(ZIM3) (SEQ ID NO: 3025). Puromycin selection was conducted 48 hrs post transfection. Cells were passaged every 3-4 days, and flow cytometry readout obtained every 3-7 days.

[0382] Flow cytometry readout gating was performed for live, single cells, and % repression gated against early day5/day9 dcas9+non targeting guide. Measurements at day 21 are shown in FIG. 18A-18B for two different guide nucleic acids (FIG. 18A for gKD010 (SEQ ID NO: 2937) and FIG. 18B for gTRO79 (SEQ ID NO: 2942)). Fusion proteins in the legend from top to bottom correspond to data points shown in the graphs from left to right.

1. A composition comprising a fusion protein or a nucleic acid encoding the fusion protein, wherein the fusion protein comprises:
a) an effector protein comprising an amino acid sequence that is at least 90% identical to SEQ ID NO: 1, wherein the effector protein comprises at least one amino acid substitution relative to SEQ ID NO: 1, wherein the amino acid substitution is selected from: L26R, L26K, K38R, Q54R, Q79R, K92E, S108R, E109R, T114R, E119S, A121Q, L182R, Q183R, K184R, K189P, S198R, H208R, Y220S, S223P, E258K, D369A, D369N, N406K, K435Q, I471T, V521T, E567A, E567Q, N568D, S638K, D658A, and D658N, and a combination thereof;
b) a methyltransferase; and
c) a repressor domain.

2. (canceled)

3. The composition of claim 1, wherein the effector protein comprises a first amino acid substitution selected from: L26R, L26K, K38R, Q54R, Q79R, K92E, S108R, E109R, T114R, E119S, A121Q, L182R, Q183R, K184R, K189P, S198R, H208R, Y220S, S223P, E258K, N406K, K435Q, I471T, V521T, N568D, and S638K, and a second amino acid substitution selected from: D369A, D369N, D658A, D658N, E567A, and E567Q.

4. The composition of claim 3, wherein the effector protein comprises the amino acid substitutions L26K, K189P, S223, E258K, K435Q, I471T, and E567Q.

5. (canceled)

6. (canceled)

7. The composition of claim 1, wherein the length of the effector protein is 400 to 800 amino acids.

8. (canceled)

9. The composition of claim 1, wherein the at least one methyltransferase is selected from DNMT3A, and DNMT3L, and a combination thereof.

10. The composition of claim 1, wherein the methyltransferase comprises an amino acid sequence that is at least 90% identical to a sequence selected from SEQ ID NO: 10 and SEQ ID NO: 11.

11. The composition of claim 1, wherein the repressor domain is selected from KRAB(ZNF10), KRAB (ZIM3), YAF2, MPP8, RYBP, CBX3VD, and CBX5VD, and a combination thereof.

12. The composition of claim 1, wherein the repressor domain comprises an amino acid sequence that is at least 90% identical to a sequence selected from SEQ ID NOs: 12 and 3005-3009.

13. The composition of claim 1, comprising a guide nucleic acid or a nucleic acid encoding the guide nucleic acid, wherein the guide nucleic acid comprises a protein binding sequence and a spacer sequence, and wherein the spacer sequence is at least 90% complementary to a target sequence in a human genome.

14. (canceled)

15. (canceled)

16. The composition of claim 13, wherein the protein binding sequence comprises a sequence that is at least 80% identical to a nucleotide sequence selected from SEQ ID NOs: 5-9.

17. The composition of claim 13, wherein the target sequence is located in a human gene selected from TABLE 11.

18. (canceled)

19. (canceled)

20. The composition of claim 13, wherein the target sequence is adjacent to a protospacer adjacent motif of 5′-NTTN-3′.

21. (canceled)

22. (canceled)

23. (canceled)

24. (canceled)

25. (canceled)

26. The composition of claim 1, wherein amongst the effector protein, methyltransferase, and repressor domain, the effector protein is nearest to the N terminus, the repressor domain is located nearest to the C terminus, and the methyltransferase is located between the effector protein and the repressor domain.

27. The composition of claim 1, wherein the nucleic acid encoding the fusion protein is an adeno associated viral (AAV) vector.

28. (canceled)

29. The composition of claim 1, further comprising a lipid nanoparticle (LNP).

30. The composition of claim 29, wherein the nucleic acid encoding the fusion protein is a messenger RNA.

31. (canceled)

32. A composition comprising a fusion protein or a nucleic acid encoding the fusion protein, wherein the fusion protein comprises:
a) an effector protein; and
b) a methyltransferase, wherein the methyltransferase is DNMT3L,
wherein the composition does not comprise DNMT3A.

33. (canceled)

34. (canceled)

35. (canceled)

36. (canceled)

37. (canceled)

38. (canceled)

39. (canceled)

40. (canceled)

41. A method of modifying a target nucleic acid or the expression thereof, the method comprising contacting the target nucleic acid with the composition of claim 1.

42. A cell modified by the composition of claim 1.

43. (canceled)

44. A method of reducing expression of a gene in a cell, the method comprising contacting the cell with the composition of claim 1.

45. (canceled)

The application's sequence listing, which the Patent Office published only in electronic form, follows.

SEQUENCE LISTING (3061 sequences)

SEQ ID NO: 1 - protein, 717 aa, unidentified
MIKPTVSQFLTPGFKLIRNHSRTAGLKLKNEGEEACKKFVRENEIPKDECPNFQGGPAIANIIAKSREFTEWEIYQSSLAIQEVIFTLPKDKLPEPILKEEWRAQWLSEHGLDTVPYKEAAGLNLIIKNAVNTYKGVQVKVDNKNKNNLAKINRKNEIAKLNGEQEISFEEIKAFDDKGYLLQKPSPNKSIYCYQSVSPKPFITSKYHNVNLPEEYIGYYRKSNEPIVSPYQFDRLRIPIGEPGYVPKWQYTFLSKKENKRRKLSKRIKNVSPILGIICIKKDWCVFDMRGLLRTNHWKKYHKPTDSINDLFDYFTGDPVIDTKANVVRFRYKMENGIVNYKPVREKKGKELLENICDQNGSCKLATVDVGQNNPVAIGLFELKKVNGELTKTLISRHPTPIDFCNKITAYRERYDKLESSIKLDAIKQLTSEQKIEVDNYNNNFTPQNTKQIVCSKLNINPNDLPWDKMISGTHFISEKAQVSNKSEIYFTSTDKGKTKDVMKSDYKWFQDYKPKLSKEVRDALSDIEWRLRRESLEFNKLSKSREQDARQLANWISSMCDVIGIENLVKKNNFFGGSGKREPGWDNFYKPKKENRWWINAIHKALTELSQNKGKRVILLPAMRTSITCPKCKYCDSKNRNGEKFNCLKCGIELNADIDVATENLATVAITAQSMPKPTCERSGDAKKPVRARKAKAPEFHDKLAPSYTVVLREAV

SEQ ID NO: 2 - protein, 717 aa, synthetic construct
MIKPTVSQFLTPGFKLIRNHSRTAGRKLKNEGEEACKKFVRENEIPKDECPNFQGGPAIANIIAKSREFTEWEIYQSSLAIQEVIFTLPKDKLPEPILKEEWRAQWLSEHGLDTVPYKEAAGLNLIIKNAVNTYKGVQVKVDNKNKNNLAKINRKNEIAKLNGEQEISFEEIKAFDDKGYLLQKPSPNKSIYCYQSVSPKPFITSKYHNVNLPEEYIGYYRKSNEPIVSPYQFDRLRIPIGEPGYVPKWQYTFLSKKENKRRKLSKRIKNVSPILGIICIKKDWCVFDMRGLLRTNHWKKYHKPTDSINDLFDYFTGDPVIDTKANVVRFRYKMENGIVNYKPVREKKGKELLENICDQNGSCKLATVDVGQNNPVAIGLFELKKVNGELTKTLISRHPTPIDFCNKITAYRERYDKLESSIKLDAIKQLTSEQKIEVDNYNNNFTPQNTKQIVCSKLNINPNDLPWDKMISGTHFISEKAQVSNKSEIYFTSTDKGKTKDVMKSDYKWFQDYKPKLSKEVRDALSDIEWRLRRESLEFNKLSKSREQDARQLANWISSMCDVIGIQNLVKKNNFFGGSGKREPGWDNFYKPKKENRWWINAIHKALTELSQNKGKRVILLPAMRTSITCPKCKYCDSKNRNGEKFNCLKCGIELNADIDVATENLATVAITAQSMPKPTCERSGDAKKPVRARKAKAPEFHDKLAPSYTVVLREAV

SEQ ID NO: 3 - protein, 17 aa, synthetic construct
MAPKKKRKVGIHGVPAA

SEQ ID NO: 4 - protein, 18 aa, synthetic construct
KRPAATKKAGQAKKKKEF

SEQ ID NO: 5 - RNA, 20 nt, synthetic construct
  source 1..20: mol_type = other RNA
attgctccttacgaggagac

SEQ ID NO: 6 - RNA, 21 nt, synthetic construct
  source 1..21: mol_type = other RNA
gattgctccttacgaggagac

SEQ ID NO: 7 - RNA, 22 nt, synthetic construct
  source 1..22: mol_type = other RNA
agattgctccttacgaggagac

SEQ ID NO: 8 - RNA, 23 nt, synthetic construct
  source 1..23: mol_type = other RNA
tagattgctccttacgaggagac

SEQ ID NO: 9 - RNA, 24 nt, synthetic construct
  source 1..24: mol_type = other RNA
atagattgctccttacgaggagac

SEQ ID NO: 10 - protein, 302 aa, Homo sapiens
MNHDQEFDPPKVYPPVPAEKRKPIRVLSLFDGIATGLLVLKDLGIQVDRYIASEVCEDSITVGMVRHQGKIMYVGDVRSVTQKHIQEWGPFDLVIGGSPCNDLSIVNPARKGLYEGTGRLFFEFYRLLHDARPKEGDDRPFFWLFENVVAMGVSDKRDISRFLESNPVMIDAKEVSAAHRARYFWGNLPGMNRPLASTVNDKLELQECLEHGRIAKFSKVRTITTRSNSIKQGKDQHFPVFMNEKEDILWCTEMERVFGFPVHYTDVSNMSRLARQRLLGRSWSVPVIRHLFAPLKEYFACV

SEQ ID NO: 11 - protein, 215 aa, Homo sapiens
MGPMEIYKTVSAWKRQPVRVLSLFRNIDKVLKSLGFLESGSGSGGGTLKYVEDVTNVVRRDVEKWGPFDLVYGSTQPLGSSCDRCPGWYMFQFHRILQYALPRQESQRPFFWIFMDNLLLTEDDQETTTRFLQTEAVTLQDVRGRDYQNAMRVWSNIPGLKSKHAPLTPKEEEYLQAQVRSRSKLDAPKVDLLVKNCLLPLREYFKYFSQNSLPL

SEQ ID NO: 12 - protein, 75 aa, Homo sapiens
MDAKSLTAWSRTLVTFKDVFVDFTREEWKLLDTAQQIVYRNVMLENYKNLVSLGYQLTKPDVILRLEKGEEPWLV

SEQ ID NO: 13 - protein, 20 aa, Synthetic construct
GSPAGSPTSTEEGTSESATP

SEQ ID NO: 14 - protein, 54 aa, synthetic construct
GGPSSGAPPPSGGSPAGSPTSTEEGTSESATPESGPGTSTEPSEGSAPGSPAGS

SEQ ID NO: 15 - protein, 27 aa, synthetic construct
SSGNSNANSRGPSFSSGLVPLSLRGSH

SEQ ID NO: 16 - protein, 1445 aa, synthetic construct
MNHDQEFDPPKVYPPVPAEKRKPIRVLSLFDGIATGLLVLKDLGIQVDRYIASEVCEDSITVGMVRHQGKIMYVGDVRSVTQKHIQEWGPFDLVIGGSPCNDLSIVNPARKGLYEGTGRLFFEFYRLLHDARPKEGDDRPFFWLFENVVAMGVSDKRDISRFLESNPVMIDAKEVSAAHRARYFWGNLPGMNRPLASTVNDKLELQECLEHGRIAKFSKVRTITTRSNSIKQGKDQHFPVFMNEKEDILWCTEMERVFGFPVHYTDVSNMSRLARQRLLGRSWSVPVIRHLFAPLKEYFACVSSGNSNANSRGPSFSSGLVPLSLRGSHMGPMEIYKTVSAWKRQPVRVLSLFRNIDKVLKSLGFLESGSGSGGGTLKYVEDVTNVVRRDVEKWGPFDLVYGSTQPLGSSCDRCPGWYMFQFHRILQYALPRQESQRPFFWIFMDNLLLTEDDQETTTRFLQTEAVTLQDVRGRDYQNAMRVWSNIPGLKSKHAPLTPKEEEYLQAQVRSRSKLDAPKVDLLVKNCLLPLREYFKYFSQNSLPLGGPSSGAPPPSGGSPAGSPTSTEEGTSESATPESGPGTSTEPSEGSAPGSPAGSMAPKKKRKVGIHGVPAAMIKPTVSQFLTPGFKLIRNHSRTAGRKLKNEGEEACKKFVRENEIPKDECPNFQGGPAIANIIAKSREFTEWEIYQSSLAIQEVIFTLPKDKLPEPILKEEWRAQWLSEHGLDTVPYKEAAGLNLIIKNAVNTYKGVQVKVDNKNKNNLAKINRKNEIAKLNGEQEISFEEIKAFDDKGYLLQKPSPNKSIYCYQSVSPKPFITSKYHNVNLPEEYIGYYRKSNEPIVSPYQFDRLRIPIGEPGYVPKWQYTFLSKKENKRRKLSKRIKNVSPILGIICIKKDWCVFDMRGLLRTNHWKKYHKPTDSINDLFDYFTGDPVIDTKANVVRFRYKMENGIVNYKPVREKKGKELLENICDQNGSCKLATVDVGQNNPVAIGLFELKKVNGELTKTLISRHPTPIDFCNKITAYRERYDKLESSIKLDAIKQLTSEQKIEVDNYNNNFTPQNTKQIVCSKLNINPNDLPWDKMISGTHFISEKAQVSNKSEIYFTSTDKGKTKDVMKSDYKWFQDYKPKLSKEVRDALSDIEWRLRRESLEFNKLSKSREQDARQLANWISSMCDVIGIQNLVKKNNFFGGSGKREPGWDNFYKPKKENRWWINAIHKALTELSQNKGKRVILLPAMRTSITCPKCKYCDSKNRNGEKFNCLKCGIELNADIDVATENLATVAITAQSMPKPTCERSGDAKKPVRARKAKAPEFHDKLAPSYTVVLREAVKRPAATKKAGQAKKKKEFGSPAGSPTSTEEGTSESATPMDAKSLTAWSRTLVTFKDVFVDFTREEWKLLDTAQQIVYRNVMLENYKNLVSLGYQLTKPDVILRLEKGEEPWLV

SEQ ID NO: 17 - protein, 1445 aa, synthetic construct
MDAKSLTAWSRTLVTFKDVFVDFTREEWKLLDTAQQIVYRNVMLENYKNLVSLGYQLTKPDVILRLEKGEEPWLVGSPAGSPTSTEEGTSESATPMAPKKKRKVGIHGVPAAMIKPTVSQFLTPGFKLIRNHSRTAGRKLKNEGEEACKKFVRENEIPKDECPNFQGGPAIANIIAKSREFTEWEIYQSSLAIQEVIFTLPKDKLPEPILKEEWRAQWLSEHGLDTVPYKEAAGLNLIIKNAVNTYKGVQVKVDNKNKNNLAKINRKNEIAKLNGEQEISFEEIKAFDDKGYLLQKPSPNKSIYCYQSVSPKPFITSKYHNVNLPEEYIGYYRKSNEPIVSPYQFDRLRIPIGEPGYVPKWQYTFLSKKENKRRKLSKRIKNVSPILGIICIKKDWCVFDMRGLLRTNHWKKYHKPTDSINDLFDYFTGDPVIDTKANVVRFRYKMENGIVNYKPVREKKGKELLENICDQNGSCKLATVDVGQNNPVAIGLFELKKVNGELTKTLISRHPTPIDFCNKITAYRERYDKLESSIKLDAIKQLTSEQKIEVDNYNNNFTPQNTKQIVCSKLNINPNDLPWDKMISGTHFISEKAQVSNKSEIYFTSTDKGKTKDVMKSDYKWFQDYKPKLSKEVRDALSDIEWRLRRESLEFNKLSKSREQDARQLANWISSMCDVIGIQNLVKKNNFFGGSGKREPGWDNFYKPKKENRWWINAIHKALTELSQNKGKRVILLPAMRTSITCPKCKYCDSKNRNGEKFNCLKCGIELNADIDVATENLATVAITAQSMPKPTCERSGDAKKPVRARKAKAPEFHDKLAPSYTVVLREAVKRPAATKKAGQAKKKKEFGGPSSGAPPPSGGSPAGSPTSTEEGTSESATPESGPGTSTEPSEGSAPGSPAGSMGPMEIYKTVSAWKRQPVRVLSLFRNIDKVLKSLGFLESGSGSGGGTLKYVEDVTNVVRRDVEKWGPFDLVYGSTQPLGSSCDRCPGWYMFQFHRILQYALPRQESQRPFFWIFMDNLLLTEDDQETTTRFLQTEAVTLQDVRGRDYQNAMRVWSNIPGLKSKHAPLTPKEEEYLQAQVRSRSKLDAPKVDLLVKNCLLPLREYFKYFSQNSLPLSSGNSNANSRGPSFSSGLVPLSLRGSHMNHDQEFDPPKVYPPVPAEKRKPIRVLSLFDGIATGLLVLKDLGIQVDRYIASEVCEDSITVGMVRHQGKIMYVGDVRSVTQKHIQEWGPFDLVIGGSPCNDLSIVNPARKGLYEGTGRLFFEFYRLLHDARPKEGDDRPFFWLFENVVAMGVSDKRDISRFLESNPVMIDAKEVSAAHRARYFWGNLPGMNRPLASTVNDKLELQECLEHGRIAKFSKVRTITTRSNSIKQGKDQHFPVFMNEKEDILWCTEMERVFGFPVHYTDVSNMSRLARQRLLGRSWSVPVIRHLFAPLKEYFACV

SEQ ID NO: 18 - protein, 1116 aa, synthetic construct
MDAKSLTAWSRTLVTFKDVFVDFTREEWKLLDTAQQIVYRNVMLENYKNLVSLGYQLTKPDVILRLEKGEEPWLVGSPAGSPTSTEEGTSESATPMAPKKKRKVGIHGVPAAMIKPTVSQFLTPGFKLIRNHSRTAGRKLKNEGEEACKKFVRENEIPKDECPNFQGGPAIANIIAKSREFTEWEIYQSSLAIQEVIFTLPKDKLPEPILKEEWRAQWLSEHGLDTVPYKEAAGLNLIIKNAVNTYKGVQVKVDNKNKNNLAKINRKNEIAKLNGEQEISFEEIKAFDDKGYLLQKPSPNKSIYCYQSVSPKPFITSKYHNVNLPEEYIGYYRKSNEPIVSPYQFDRLRIPIGEPGYVPKWQYTFLSKKENKRRKLSKRIKNVSPILGIICIKKDWCVFDMRGLLRTNHWKKYHKPTDSINDLFDYFTGDPVIDTKANVVRFRYKMENGIVNYKPVREKKGKELLENICDQNGSCKLATVDVGQNNPVAIGLFELKKVNGELTKTLISRHPTPIDFCNKITAYRERYDKLESSIKLDAIKQLTSEQKIEVDNYNNNFTPQNTKQIVCSKLNINPNDLPWDKMISGTHFISEKAQVSNKSEIYFTSTDKGKTKDVMKSDYKWFQDYKPKLSKEVRDALSDIEWRLRRESLEFNKLSKSREQDARQLANWISSMCDVIGIQNLVKKNNFFGGSGKREPGWDNFYKPKKENRWWINAIHKALTELSQNKGKRVILLPAMRTSITCPKCKYCDSKNRNGEKFNCLKCGIELNADIDVATENLATVAITAQSMPKPTCERSGDAKKPVRARKAKAPEFHDKLAPSYTVVLREAVKRPAATKKAGQAKKKKEFGGPSSGAPPPSGGSPAGSPTSTEEGTSESATPESGPGTSTEPSEGSAPGSPAGSMGPMEIYKTVSAWKRQPVRVLSLFRNIDKVLKSLGFLESGSGSGGGTLKYVEDVTNVVRRDVEKWGPFDLVYGSTQPLGSSCDRCPGWYMFQFHRILQYALPRQESQRPFFWIFMDNLLLTEDDQETTTRFLQTEAVTLQDVRGRDYQNAMRVWSNIPGLKSKHAPLTPKEEEYLQAQVRSRSKLDAPKVDLLVKNCLLPLREYFKYFSQNSLPL

SEQ ID NO: 19 - protein, 1116 aa, synthetic construct
MAPKKKRKVGIHGVPAAMIKPTVSQFLTPGFKLIRNHSRTAGRKLKNEGEEACKKFVRENEIPKDECPNFQGGPAIANIIAKSREFTEWEIYQSSLAIQEVIFTLPKDKLPEPILKEEWRAQWLSEHGLDTVPYKEAAGLNLIIKNAVNTYKGVQVKVDNKNKNNLAKINRKNEIAKLNGEQEISFEEIKAFDDKGYLLQKPSPNKSIYCYQSVSPKPFITSKYHNVNLPEEYIGYYRKSNEPIVSPYQFDRLRIPIGEPGYVPKWQYTFLSKKENKRRKLSKRIKNVSPILGIICIKKDWCVFDMRGLLRTNHWKKYHKPTDSINDLFDYFTGDPVIDTKANVVRFRYKMENGIVNYKPVREKKGKELLENICDQNGSCKLATVDVGQNNPVAIGLFELKKVNGELTKTLISRHPTPIDFCNKITAYRERYDKLESSIKLDAIKQLTSEQKIEVDNYNNNFTPQNTKQIVCSKLNINPNDLPWDKMISGTHFISEKAQVSNKSEIYFTSTDKGKTKDVMKSDYKWFQDYKPKLSKEVRDALSDIEWRLRRESLEFNKLSKSREQDARQLANWISSMCDVIGIQNLVKKNNFFGGSGKREPGWDNFYKPKKENRWWINAIHKALTELSQNKGKRVILLPAMRTSITCPKCKYCDSKNRNGEKFNCLKCGIELNADIDVATENLATVAITAQSMPKPTCERSGDAKKPVRARKAKAPEFHDKLAPSYTVVLREAVKRPAATKKAGQAKKKKEFGGPSSGAPPPSGGSPAGSPTSTEEGTSESATPESGPGTSTEPSEGSAPGSPAGSMGPMEIYKTVSAWKRQPVRVLSLFRNIDKVLKSLGFLESGSGSGGGTLKYVEDVTNVVRRDVEKWGPFDLVYGSTQPLGSSCDRCPGWYMFQFHRILQYALPRQESQRPFFWIFMDNLLLTEDDQETTTRFLQTEAVTLQDVRGRDYQNAMRVWSNIPGLKSKHAPLTPKEEEYLQAQVRSRSKLDAPKVDLLVKNCLLPLREYFKYFSQNSLPLGSPAGSPTSTEEGTSESATPMDAKSLTAWSRTLVTFKDVFVDFTREEWKLLDTAQQIVYRNVMLENYKNLVSLGYQLTKPDVILRLEKGEEPWLV

SEQ ID NO: 20 - protein, 1116 aa, synthetic construct
MGPMEIYKTVSAWKRQPVRVLSLFRNIDKVLKSLGFLESGSGSGGGTLKYVEDVTNVVRRDVEKWGPFDLVYGSTQPLGSSCDRCPGWYMFQFHRILQYALPRQESQRPFFWIFMDNLLLTEDDQETTTRFLQTEAVTLQDVRGRDYQNAMRVWSNIPGLKSKHAPLTPKEEEYLQAQVRSRSKLDAPKVDLLVKNCLLPLREYFKYFSQNSLPLGGPSSGAPPPSGGSPAGSPTSTEEGTSESATPESGPGTSTEPSEGSAPGSPAGSMDAKSLTAWSRTLVTFKDVFVDFTREEWKLLDTAQQIVYRNVMLENYKNLVSLGYQLTKPDVILRLEKGEEPWLVGSPAGSPTSTEEGTSESATPMAPKKKRKVGIHGVPAAMIKPTVSQFLTPGFKLIRNHSRTAGRKLKNEGEEACKKFVRENEIPKDECPNFQGGPAIANIIAKSREFTEWEIYQSSLAIQEVIFTLPKDKLPEPILKEEWRAQWLSEHGLDTVPYKEAAGLNLIIKNAVNTYKGVQVKVDNKNKNNLAKINRKNEIAKLNGEQEISFEEIKAFDDKGYLLQKPSPNKSIYCYQSVSPKPFITSKYHNVNLPEEYIGYYRKSNEPIVSPYQFDRLRIPIGEPGYVPKWQYTFLSKKENKRRKLSKRIKNVSPILGIICIKKDWCVFDMRGLLRTNHWKKYHKPTDSINDLFDYFTGDPVIDTKANVVRFRYKMENGIVNYKPVREKKGKELLENICDQNGSCKLATVDVGQNNPVAIGLFELKKVNGELTKTLISRHPTPIDFCNKITAYRERYDKLESSIKLDAIKQLTSEQKIEVDNYNNNFTPQNTKQIVCSKLNINPNDLPWDKMISGTHFISEKAQVSNKSEIYFTSTDKGKTKDVMKSDYKWFQDYKPKLSKEVRDALSDIEWRLRRESLEFNKLSKSREQDARQLANWISSMCDVIGIQNLVKKNNFFGGSGKREPGWDNFYKPKKENRWWINAIHKALTELSQNKGKRVILLPAMRTSITCPKCKYCDSKNRNGEKFNCLKCGIELNADIDVATENLATVAITAQSMPKPTCERSGDAKKPVRARKAKAPEFHDKLAPSYTVVLREAVKRPAATKKAGQAKKKKEF

SEQ ID NO: 21 - protein, 847 aa, synthetic construct
MDAKSLTAWSRTLVTFKDVFVDFTREEWKLLDTAQQIVYRNVMLENYKNLVSLGYQLTKPDVILRLEKGEEPWLVGSPAGSPTSTEEGTSESATPMAPKKKRKVGIHGVPAAMIKPTVSQFLTPGFKLIRNHSRTAGRKLKNEGEEACKKFVRENEIPKDECPNFQGGPAIANIIAKSREFTEWEIYQSSLAIQEVIFTLPKDKLPEPILKEEWRAQWLSEHGLDTVPYKEAAGLNLIIKNAVNTYKGVQVKVDNKNKNNLAKINRKNEIAKLNGEQEISFEEIKAFDDKGYLLQKPSPNKSIYCYQSVSPKPFITSKYHNVNLPEEYIGYYRKSNEPIVSPYQFDRLRIPIGEPGYVPKWQYTFLSKKENKRRKLSKRIKNVSPILGIICIKKDWCVFDMRGLLRTNHWKKYHKPTDSINDLFDYFTGDPVIDTKANVVRFRYKMENGIVNYKPVREKKGKELLENICDQNGSCKLATVDVGQNNPVAIGLFELKKVNGELTKTLISRHPTPIDFCNKITAYRERYDKLESSIKLDAIKQLTSEQKIEVDNYNNNFTPQNTKQIVCSKLNINPNDLPWDKMISGTHFISEKAQVSNKSEIYFTSTDKGKTKDVMKSDYKWFQDYKPKLSKEVRDALSDIEWRLRRESLEFNKLSKSREQDARQLANWISSMCDVIGIQNLVKKNNFFGGSGKREPGWDNFYKPKKENRWWINAIHKALTELSQNKGKRVILLPAMRTSITCPKCKYCDSKNRNGEKFNCLKCGIELNADIDVATENLATVAITAQSMPKPTCERSGDAKKPVRARKAKAPEFHDKLAPSYTVVLREAVKRPAATKKAGQAKKKKEF

SEQ ID NO: 22 - protein, 2108 aa, synthetic construct
MNHDQEFDPPKVYPPVPAEKRKPIRVLSLFDGIATGLLVLKDLGIQVDRYIASEVCEDSITVGMVRHQGKIMYVGDVRSVTQKHIQEWGPFDLVIGGSPCNDLSIVNPARKGLYEGTGRLFFEFYRLLHDARPKEGDDRPFFWLFENVVAMGVSDKRDISRFLESNPVMIDAKEVSAAHRARYFWGNLPGMNRPLASTVNDKLELQECLEHGRIAKFSKVRTITTRSNSIKQGKDQHFPVFMNEKEDILWCTEMERVFGFPVHYTDVSNMSRLARQRLLGRSWSVPVIRHLFAPLKEYFACVSSGNSNANSRGPSFSSGLVPLSLRGSHMGPMEIYKTVSAWKRQPVRVLSLFRNIDKVLKSLGFLESGSGSGGGTLKYVEDVTNVVRRDVEKWGPFDLVYGSTQPLGSSCDRCPGWYMFQFHRILQYALPRQESQRPFFWIFMDNLLLTEDDQETTTRFLQTEAVTLQDVRGRDYQNAMRVWSNIPGLKSKHAPLTPKEEEYLQAQVRSRSKLDAPKVDLLVKNCLLPLREYFKYFSQNSLPLGGPSSGAPPPSGGSPAGSPTSTEEGTSESATPESGPGTSTEPSEGSAPGSPAGSSHGGGSGGSPKKKRKVGIHGVPAADKKYSIGLAIGTNSVGWAVITDEYKVPSKKFKVLGNTDRHSIKKNLIGALLFDSGETAEATRLKRTARRRYTRRKNRICYLQEIFSNEMAKVDDSFFHRLEESFLVEEDKKHERHPIFGNIVDEVAYHEKYPTIYHLRKKLVDSTDKADLRLIYLALAHMIKFRGHFLIEGDLNPDNSDVDKLFIQLVQTYNQLFEENPINASGVDAKAILSARLSKSRRLENLIAQLPGEKKNGLFGNLIALSLGLTPNFKSNFDLAEDAKLQLSKDTYDDDLDNLLAQIGDQYADLFLAAKNLSDAILLSDILRVNTEITKAPLSASMIKRYDEHHQDLTLLKALVRQQLPEKYKEIFFDQSKNGYAGYIDGGASQEEFYKFIKPILEKMDGTEELLVKLNREDLLRKQRTFDNGSIPHQIHLGELHAILRRQEDFYPFLKDNREKIEKILTFRIPYYVGPLARGNSRFAWMTRKSEETITPWNFEEVVDKGASAQSFIERMTNFDKNLPNEKVLPKHSLLYEYFTVYNELTKVKYVTEGMRKPAFLSGEQKKAIVDLLFKTNRKVTVKQLKEDYFKKIECFDSVEISGVEDRFNASLGTYHDLLKIIKDKDFLDNEENEDILEDIVLTLTLFEDREMIEERLKTYAHLFDDKVMKQLKRRRYTGWGRLSRKLINGIRDKQSGKTILDFLKSDGFANRNFMQLIHDDSLTFKEDIQKAQVSGQGDSLHEHIANLAGSPAIKKGILQTVKVVDELVKVMGRHKPENIVIEMARENQTTQKGQKNSRERMKRIEEGIKELGSQILKEHPVENTQLQNEKLYLYYLQNGRDMYVDQELDINRLSDYDVDAIVPQSFLKDDSIDNKVLTRSDKNRGKSDNVPSEEVVKKMKNYWRQLLNAKLITQRKFDNLTKAERGGLSELDKAGFIKRQLVETRQITKHVAQILDSRMNTKYDENDKLIREVKVITLKSKLVSDFRKDFQFYKVREINNYHHAHDAYLNAVVGTALIKKYPKLESEFVYGDYKVYDVRKMIAKSEQEIGKATAKYFFYSNIMNFFKTEITLANGEIRKRPLIETNGETGEIVWDKGRDFATVRKVLSMPQVNIVKKTEVQTGGFSKESILPKRNSDKLIARKKDWDPKKYGGFDSPTVAYSVLVVAKVEKGKSKKLKSVKELLGITIMERSSFEKNPIDFLEAKGYKEVKKDLIIKLPKYSLFELENGRKRMLASAGELQKGNELALPSKYVNFLYLASHYEKLKGSPEDNEQKQLFVEQHKHYLDEIIEQISEFSKRVILADANLDKVLSAYNKHRDKPIREQAENIIHLFTLTNLGAPAAFKYFDTTIDRKRYTSTKEVLDATLIHQSITGLYETRIDLSQLGGDKRPAATKKAGQAKKKKTSGSGGSPAGSPTSTEEGTSESATPGSGMDAKSLTAWSRTLVTFKDVFVDFTREEWKLLDTAQQIVYRNVMLENYKNLVSLGYQLTKPDVILRLEKGEEPWLV

SEQ ID NO: 23 - RNA, 40 nt, synthetic construct
  source 1..40: mol_type = other RNA
attgctccttacgaggagaccggcaagactagcgcagaga

SEQ ID NO: 24 - RNA, 40 nt, synthetic construct
  source 1..40: mol_type = other RNA
attgctccttacgaggagacgtcgcgcggctccctacgca

SEQ ID NO: 25 - RNA, 105 nt, synthetic construct
  source 1..105: mol_type = other RNA
ctcctcagaaccaagcgtcgtttaagagctatgctggaaacagcatagcaagtttaaataaggctagtccgttatcaacttgaaaaagtggcaccgagtcggtgc

SEQ ID NO: 26 - protein, 5 aa, synthetic construct
  REGION >5: note = The entire sequence of amino acids 1-5 can be repeated one or more times
GSGGS

SEQ ID NO: 27 - protein, 6 aa, synthetic construct
  REGION >6: note = The entire sequence of amino acids 1-6 can be repeated one or more times
GGSGGS

SEQ ID NO: 28 - protein, 4 aa, synthetic construct
  REGION >4: note = The entire sequence of amino acids 1-4 can be repeated one or more times
GGGS

SEQ ID NO: 29 - protein, 4 aa, synthetic construct
GGSG

SEQ ID NO: 30 - protein, 5 aa, synthetic construct
GGSGG

SEQ ID NO: 31 - protein, 5 aa, synthetic construct
GSGSG

SEQ ID NO: 32 - protein, 5 aa, synthetic construct
GSGGG

SEQ ID NO: 33 - protein, 5 aa, synthetic construct
GGGSG

SEQ ID NO: 34 - protein, 5 aa, synthetic construct
GSSSG

SEQ ID NO: 35 - protein, 448 aa, unidentified
MSVLTRKVQLIPVGDKEERDRVYKYLRDGIEAQNRAMNLYMSGLYFAAINEASKEDRKELNQLYSRIATSSKGSAYTTDIEFPTGLASTSTLSMAVRQDFTKSLKDGLMYGRVSLPTYRKDNPLFVDVRFVALRGTKQKYNGLYHEYKSHTEFLDNLYSSDLKVYIKFANDITFQVIFGNPRKSSALRSEFQNIFEEYYKVCQSSIQFSGTKIILNMAMDIPDKEIELDEDVCVGVDLGIAIPAVCALNKNRYSRVSIGSKEDFLRVRTKIRNQRKRLQTNLKSSNGGHGRKKKMKPMDRFRDYEANWVQNYNHYVSRQVVDFAVKNKAKYINLENLEGIRDDVKNEWLLSNWSYYQLQQYITYKAKTYGIEVRKINPYHTSQRCSCCGYEDAGNRPKKEKGQAYFKCLKCGEEMNADFNAARNIAMSTEFQSGKKTKKQKKEQHENK

SEQ ID NO: 36 - RNA, 69 nt, synthetic construct
  source 1..69: mol_type = other RNA
acagcttatttggaagctgaaatgtgaggtttataacactcacaagaatcctgaaaaaggatgccaaac

SEQ ID NO: 37 - RNA, 17 nt, synthetic construct
  source 1..17: mol_type = other RNA
cccaactctcccgcccg

SEQ ID NO: 38 - RNA, 17 nt, synthetic construct
  source 1..17: mol_type = other RNA
aggcttagggctggagg

SEQ ID NO: 39 - RNA, 17 nt, synthetic construct
  source 1..17: mol_type = other RNA
ccctctcaccagcctct

SEQ ID NO: 40 - RNA, 17 nt, synthetic construct
  source 1..17: mol_type = other RNA
agggcttggggctggtg

SEQ ID NO: 41 - RNA, 17 nt, synthetic construct
  source 1..17: mol_type = other RNA
ctccaaacaccccccag

SEQ ID NO: 42 - RNA, 17 nt, synthetic construct
  source 1..17: mol_type = other RNA
gggctggaggaagcctt

SEQ ID NO: 43 - RNA, 17 nt, synthetic construct
  source 1..17: mol_type = other RNA
ccaactctcccgcccgc

SEQ ID NO: 44 - RNA, 17 nt, synthetic construct
  source 1..17: mol_type = other RNA
gctggactggacggaga

SEQ ID NO: 45 - RNA, 17 nt, synthetic construct
  source 1..17: mol_type = other RNA
tctgctccatcccaccc

SEQ ID NO: 46 - RNA, 17 nt, synthetic construct
  source 1..17: mol_type = other RNA
cccagcgccctgggtcc

SEQ ID NO: 47 - RNA, 17 nt, synthetic construct
  source 1..17: mol_type = other RNA
tgtgcctttactccaaa

SEQ ID NO: 48 - RNA, 17 nt, synthetic construct
  source 1..17: mol_type = other RNA
ctgcatctggacaccct

SEQ ID NO: 49 - RNA, 17 nt, synthetic construct
  source 1..17: mol_type = other RNA
ctagagctaaggaagcc

SEQ ID NO: 50 - RNA, 17 nt, synthetic construct
  source 1..17: mol_type = other RNA
gcccagcgccctgggtc

SEQ ID NO: 51 - RNA, 17 nt, synthetic construct
  source 1..17: mol_type = other RNA
cagtgtgaaaggctgag

SEQ ID NO: 52 - RNA, 17 nt, synthetic construct
  source 1..17: mol_type = other RNA
ttcaggcttagggctgg

SEQ ID NO: 53 - RNA, 17 nt, synthetic construct
  source 1..17: mol_type = other RNA
gggcctcgatccctcgc

SEQ ID NO: 54 - RNA, 17 nt, synthetic construct
  source 1..17: mol_type = other RNA
actccaaacacccccca

SEQ ID NO: 55 - RNA, 17 nt, synthetic construct
  source 1..17: mol_type = other RNA
agtctggtgggttttct

SEQ ID NO: 56 - RNA, 17 nt, synthetic construct
  source 1..17: mol_type = other RNA
cccaaagctacacaggg

SEQ ID NO: 57 - RNA, 17 nt, synthetic construct
  source 1..17: mol_type = other RNA
tgctccatcccacccac

SEQ ID NO: 58 - RNA, 17 nt, synthetic construct
  source 1..17: mol_type = other RNA
atgttcagtctggtggg

SEQ ID NO: 59 - RNA, 17 nt, synthetic construct
  source 1..17: mol_type = other RNA
ctgctccatcccaccca

SEQ ID NO: 60 - RNA, 17 nt, synthetic construct
  source 1..17: mol_type = other RNA
atccctagaggcagctg

SEQ ID NO: 61 - RNA, 17 nt, synthetic construct
  source 1..17: mol_type = other RNA
gacagcccagtcctacc

SEQ ID NO: 62 - RNA, 17 nt, synthetic construct
  source 1..17: mol_type = other RNA
gggctggtggagggagg

SEQ ID NO: 63 - RNA, 17 nt, synthetic construct
  source 1..17: mol_type = other RNA
ctgagctcatctgggct

SEQ ID NO: 64 - RNA, 17 nt, synthetic construct
  source 1..17: mol_type = other RNA
ggcctcgatccctcgcc

SEQ ID NO: 65 - RNA, 17 nt, synthetic construct
  source 1..17: mol_type = other RNA
tcaagtctgaagaagcc

SEQ ID NO: 66 - RNA, 17 nt, synthetic construct
  source 1..17: mol_type = other RNA
cccctctcaccagcctc

SEQ ID NO: 67 - RNA, 17 nt, synthetic construct
  source 1..17: mol_type = other RNA
ttctcaagtctgaagaa

SEQ ID NO: 68 - RNA, 17 nt, synthetic construct
  source 1..17: mol_type = other RNA
ccccctcattcttcagg

SEQ ID NO: 69 - RNA, 17 nt, synthetic construct
  source 1..17: mol_type = other RNA
ggctggggggtgtttgg

SEQ ID NO: 70 - RNA, 17 nt, synthetic construct
  source 1..17: mol_type = other RNA
ggaaatccctaggagac

SEQ ID NO: 71 - RNA, 17 nt, synthetic construct
  source 1..17: mol_type = other RNA
agaacaagtgggtggct

SEQ ID NO: 72 - RNA, 17 nt, synthetic construct
  source 1..17: mol_type = other RNA
tatcatctccagggcag

SEQ ID NO: 73 - RNA, 17 nt, synthetic construct
  source 1..17: mol_type = other RNA
caggcccctccctccac

SEQ ID NO: 74 - RNA, 17 nt, synthetic construct
  source 1..17: mol_type = other RNA
cctggagcagctgcctc

SEQ ID NO: 75 - RNA, 17 nt, synthetic construct
  source 1..17: mol_type = other RNA
aggttatgatgaggggt

SEQ ID NO: 76 - RNA, 17 nt, synthetic construct
  source 1..17: mol_type = other RNA
ctggctgggctgggcag

SEQ ID NO: 77 - RNA, 17 nt, synthetic construct
  source 1..17: mol_type = other RNA
ctagctgactggctccc

SEQ ID NO: 78 - RNA, 17 nt, synthetic construct
  source 1..17: mol_type = other RNA
ttcagacttgagaacaa

SEQ ID NO: 79 - RNA, 17 nt, synthetic construct
  source 1..17: mol_type = other RNA
gagtaaaggcacagaag

SEQ ID NO: 80 - RNA, 17 nt, synthetic construct
  source 1..17: mol_type = other RNA
ggcaagtgacacccctc

SEQ ID NO: 81 - RNA, 17 nt, synthetic construct
  source 1..17: mol_type = other RNA
tgatgaggggtgggggg

SEQ ID NO: 82 - RNA, 17 nt, synthetic construct
  source 1..17: mol_type = other RNA
tggccctctccaggcct

SEQ ID NO: 83 - RNA, 17 nt, synthetic construct
  source 1..17: mol_type = other RNA
ttcaggttatgatgagg

SEQ ID NO: 84 - RNA, 17 nt, synthetic construct
  source 1..17: mol_type = other RNA
tatatcatctccagggc

SEQ ID NO: 85 - RNA, 17 nt, synthetic construct
  source 1..17: mol_type = other RNA
ccctccccagagggcat

SEQ ID NO: 86 - RNA, 17 nt, synthetic construct
  source 1..17: mol_type = other RNA
cccctcttcatcctcct

SEQ ID NO: 87 - RNA, 17 nt, synthetic construct
  source 1..17: mol_type = other RNA
tccaggcttgctggctg

SEQ ID NO: 88 - RNA, 17 nt, synthetic construct
  source 1..17: mol_type = other RNA
cacactggaatttcagg

SEQ ID NO: 89 - RNA, 17 nt, synthetic construct
  source 1..17: mol_type = other RNA
cctgtctggggtaggac

SEQ ID NO: 90 - RNA, 17 nt, synthetic construct
  source 1..17: mol_type = other RNA
gctctagcaagtgcttc

SEQ ID NO: 91 - RNA, 17 nt, synthetic construct
  source 1..17: mol_type = other RNA
ctggccctctccaggcc

SEQ ID NO: 92 - RNA, 17 nt, synthetic construct
  source 1..17: mol_type = other RNA
agacttgagaacaagtg

SEQ ID NO: 93 - RNA, 17 nt, synthetic construct
  source 1..17: mol_type = other RNA
ggagtaaaggcacagaa

SEQ ID NO: 94 - RNA, 17 nt, synthetic construct
  source 1..17: mol_type = other RNA
cccctccccagagggca

SEQ ID NO: 95 - RNA, 17 nt, synthetic construct
  source 1..17: mol_type = other RNA
gagccacttccagcccc

SEQ ID NO: 96 - RNA, 17 nt, synthetic construct
  source 1..17: mol_type = other RNA
cttcctagctgactggc

SEQ ID NO: 97 - RNA, 17 nt, synthetic construct
  source 1..17: mol_type = other RNA
ctccagccctaagcctg

SEQ ID NO: 98 - RNA, 17 nt, synthetic construct
  source 1..17: mol_type = other RNA
tgacctgttttatatca

SEQ ID NO: 99 - RNA, 17 nt, synthetic construct
  source 1..17: mol_type = other RNA
cagccccaccccctgtg

SEQ ID NO: 100 - RNA, 17 nt, synthetic construct
  source 1..17: mol_type = other RNA
aggcccctccctccacc

SEQ ID NO: 101 - RNA, 17 nt, synthetic construct
  source 1..17: mol_type = other RNA
cttagctctagcaagtg

SEQ ID NO: 102 - RNA, 17 nt, synthetic construct
  source 1..17: mol_type = other RNA
gggcaagtgacacccct

SEQ ID NO: 103 - RNA, 17 nt, synthetic construct
  source 1..17: mol_type = other RNA
ccctgtctggggtagga

SEQ ID NO: 104 - RNA, 17 nt, synthetic construct
  source 1..17: mol_type = other RNA
ggtgatttctggccctc

SEQ ID NO: 105 - RNA, 17 nt, synthetic construct
  source 1..17: mol_type = other RNA
gggtgatttctggccct

SEQ ID NO: 106 - RNA, 17 nt, synthetic construct
  source 1..17: mol_type = other RNA
acactggaatttcaggc

SEQ ID NO: 107 - RNA, 17 nt, synthetic construct
  source 1..17: mol_type = other RNA
gacataggccaggggcc

SEQ ID NO: 108 - RNA, 17 nt, synthetic construct
  source 1..17: mol_type = other RNA
atatcatctccagggca

SEQ ID NO: 109 - RNA, 17 nt, synthetic construct
  source 1..17: mol_type = other RNA
atcctcctcccctcctc

SEQ ID NO: 110 - RNA, 17 nt, synthetic construct
  source 1..17: mol_type = other RNA
gggagggcgaggccgaa

SEQ ID NO: 111 - RNA, 17 nt, synthetic construct
  source 1..17: mol_type = other RNA
aatcagataggatcgtc

SEQ ID NO: 112 - RNA, 17 nt, synthetic construct
  source 1..17: mol_type = other RNA
atcagataggatcgtcc

SEQ ID NO: 113 - RNA, 17 nt, synthetic construct
  source 1..17: mol_type = other RNA
ggatttgggagtttttt

SEQ ID NO: 114 - RNA, 17 nt, synthetic construct
  source 1..17: mol_type = other RNA
tcttccctctgcgcgta

SEQ ID NO: 115 - RNA, 17 nt, synthetic construct
  source 1..17: mol_type = other RNA
ggagttttttcttccct

SEQ ID NO: 116 - RNA, 17 nt, synthetic construct
  source 1..17: mol_type = other RNA
caccgctgcgccaaggt

SEQ ID NO: 117 - RNA, 17 nt, synthetic construct
  source 1..17: mol_type = other RNA
agggtctgagcctggag

SEQ ID NO: 118 - RNA, 17 nt, synthetic construct
  source 1..17: mol_type = other RNA
cgcgcgccccttcacgc

SEQ ID NO: 119 - RNA, 17 nt, synthetic construct
  source 1..17: mol_type = other RNA
cttccctctgcgcgtaa

SEQ ID NO: 120 - RNA, 17 nt, synthetic construct
  source 1..17: mol_type = other RNA
gagtctggcatcccacg

SEQ ID NO: 121 - RNA, 17 nt, synthetic construct
  source 1..17: mol_type = other RNA
agttcagggtctgagcc

SEQ ID NO: 122 - RNA, 17 nt, synthetic construct
  source 1..17: mol_type = other RNA
atgtttaatcagatagg

SEQ ID NO: 123 - RNA, 17 nt, synthetic construct
  source 1..17: mol_type = other RNA
agctcctgcacagtcct

SEQ ID NO: 124 - RNA, 17 nt, synthetic construct
  source 1..17: mol_type = other RNA
ttccctctgcgcgtaat

SEQ ID NO: 125 - RNA, 17 nt, synthetic construct
  source 1..17: mol_type = other RNA
tttcttccctctgcgcg

SEQ ID NO: 126 - RNA, 17 nt, synthetic construct
  source 1..17: mol_type = other RNA
aaggagcagctagttgg

SEQ ID NO: 127 - RNA, 17 nt, synthetic construct
  source 1..17: mol_type = other RNA
cagcagcggctcccagc

SEQ ID NO: 128 - RNA, 17 nt, synthetic construct
  source 1..17: mol_type = other RNA
ttcttccctctgcgcgt

SEQ ID NO: 129 - RNA, 17 nt, synthetic construct
  source 1..17: mol_type = other RNA
gggagttttttcttccc

SEQ ID NO: 130 - RNA, 17 nt, synthetic construct
  source 1..17: mol_type = other RNA
agaagtctcactggtca

SEQ ID NO: 131 - RNA, 17 nt, synthetic construct
  source 1..17: mol_type = other RNA
ggtgggcagcgaggagt

SEQ ID NO: 132 - RNA, 17 nt, synthetic construct
  source 1..17: mol_type = other RNA
cgcagcgacgtcgaggc

SEQ ID NO: 133 - RNA, 17 nt, synthetic construct
  source 1..17: mol_type = other RNA
cgaggaggacggcctgg

SEQ ID NO: 134 - RNA, 17 nt, synthetic construct
  source 1..17: mol_type = other RNA
aggccagtggaaagaat

SEQ ID NO: 135 - RNA, 17 nt, synthetic construct
  source 1..17: mol_type = other RNA
ggggagggcgaggccga

SEQ ID NO: 136 - RNA, 17 nt, synthetic construct
  source 1..17: mol_type = other RNA
attcagaagtctcactg

SEQ ID NO: 137 - RNA, 17 nt, synthetic construct
  source 1..17: mol_type = other RNA
cagcccagttaggattt

SEQ ID NO: 138 - RNA, 17 nt, synthetic construct
  source 1..17: mol_type = other RNA
cgttaatgtttaatcag

SEQ ID NO: 139 - RNA, 17 nt, synthetic construct
  source 1..17: mol_type = other RNA
gaaggctgccaggttaa

SEQ ID NO: 140 - RNA, 17 nt, synthetic construct
  source 1..17: mol_type = other RNA
caggcgggcgccgccgt

SEQ ID NO: 141 - RNA, 17 nt, synthetic construct
  source 1..17: mol_type = other RNA
gtaaggtcagtgtgcag

SEQ ID NO: 142 - RNA, 17 nt, synthetic construct
  source 1..17: mol_type = other RNA
cgttccgaggaggacgg

SEQ ID NO: 143 - RNA, 17 nt, synthetic construct
  source 1..17: mol_type = other RNA
cctctgcgcgtaatctg

SEQ ID NO: 144 - RNA, 17 nt, synthetic construct
  source 1..17: mol_type = other RNA
agaaggctgccaggtta

SEQ ID NO: 145 - RNA, 17 nt, synthetic construct
  source 1..17: mol_type = other RNA
acgcgccctgctcctga

SEQ ID NO: 146 - RNA, 17 nt, synthetic construct
  source 1..17: mol_type = other RNA
ccgcagcgacgtcgagg

SEQ ID NO: 147 - RNA, 17 nt, synthetic construct
  source 1..17: mol_type = other RNA
ccaactagctgctcctt

SEQ ID NO: 148 - RNA, 17 nt, synthetic construct
  source 1..17: mol_type = other RNA
agtgtttcctgggtcca

SEQ ID NO: 149 - RNA, 17 nt, synthetic construct
  source 1..17: mol_type = other RNA
tgccgggcccacctttt

SEQ ID NO: 150 - RNA, 17 nt, synthetic construct
  source 1..17: mol_type = other RNA
acggaacccccggactg

SEQ ID NO: 151 - RNA, 17 nt, synthetic construct
  source 1..17: mol_type = other RNA
cgcgcagagggaagaaa

SEQ ID NO: 152 - RNA, 17 nt, synthetic construct
  source 1..17: mol_type = other RNA
tttccactggccttaac

SEQ ID NO: 153 - RNA, 17 nt, synthetic construct
  source 1..17: mol_type = other RNA
tcagtgtttcctgggtc

SEQ ID NO: 154 - RNA, 17 nt, synthetic construct
  source 1..17: mol_type = other RNA
gcgcagcggtggaaggt

SEQ ID NO: 155 - RNA, 17 nt, synthetic construct
  source 1..17: mol_type = other RNA
tagggtgtgggtgcttg

SEQ ID NO: 156 - RNA, 17 nt, synthetic construct
  source 1..17: mol_type = other RNA
aggagcagggcgcgtga

SEQ ID NO: 157 - RNA, 17 nt, synthetic construct
  source 1..17: mol_type = other RNA
cggcctcgccctcccca

SEQ ID NO: 158 - RNA, 17 nt, synthetic construct
  source 1..17: mol_type = other RNA
cggtggggaggactgtg

SEQ ID NO: 159 - RNA, 17 nt, synthetic construct
  source 1..17: mol_type = other RNA
cctgggtccaccttgtc

SEQ ID NO: 160 - RNA, 17 nt, synthetic construct
  source 1..17: mol_type = other RNA
ggccaggccgtcctcct

SEQ ID NO: 161 - RNA, 17 nt, synthetic construct
  source 1..17: mol_type = other RNA
cagtgtttcctgggtcc

SEQ ID NO: 162 - RNA, 17 nt, synthetic construct
  source 1..17: mol_type = other RNA
tgaatcaatcctactgt

SEQ ID NO: 163 - RNA, 17 nt, synthetic construct
  source 1..17: mol_type = other RNA
ggcctcgccctccccaa

SEQ ID NO: 164 - RNA, 17 nt, synthetic construct
  source 1..17: mol_type = other RNA
aacattaacggaacccc

SEQ ID NO: 165 - RNA, 17 nt, synthetic construct
  source 1..17: mol_type = other RNA
acgcctggggcgcgcag

SEQ ID NO: 166 - RNA, 17 nt, synthetic construct
  source 1..17: mol_type = other RNA
taaacttagcctggacc

SEQ ID NO: 167 - RNA, 17 nt, synthetic construct
  source 1..17: mol_type = other RNA
cgtgctcgggtgcttcg

SEQ ID NO: 168 - RNA, 17 nt, synthetic construct
  source 1..17: mol_type = other RNA
ctgtcctggcgaggaga

SEQ ID NO: 169 - RNA, 17 nt, synthetic construct
  source 1..17: mol_type = other RNA
atgcaccctgcacactg

SEQ ID NO: 170 - RNA, 17 nt, synthetic construct
  source 1..17: mol_type = other RNA
cactggccttaacctgg

SEQ ID NO: 171 - RNA, 17 nt, synthetic construct
  source 1..17: mol_type = other RNA
ctgggtccaccttgtct

SEQ ID NO: 172 - RNA, 17 nt, synthetic construct
  source 1..17: mol_type = other RNA
tctcctgctgaccagtg

SEQ ID NO: 173 - RNA, 17 nt, synthetic construct
  source 1..17: mol_type = other RNA
gcctggaccccctccgg

SEQ ID NO: 174 - RNA, 17 nt, synthetic construct
  source 1..17: mol_type = other RNA
ccactggccttaacctg

SEQ ID NO: 175 - RNA, 17 nt, synthetic construct
  source 1..17: mol_type = other RNA
tgcaccctgcacactga

SEQ ID NO: 176 - RNA, 17 nt, synthetic construct
  source 1..17: mol_type = other RNA
acctggcagccttctaa

SEQ ID NO: 177 - RNA, 17 nt, synthetic construct
  source 1..17: mol_type = other RNA
agccttgcggtggggag

SEQ ID NO: 178 - RNA, 17 nt, synthetic construct
  source 1..17: mol_type = other RNA
ttgacttgtaaatctct

SEQ ID NO: 179 - RNA, 17 nt, synthetic construct
  source 1..17: mol_type = other RNA
ggacatggtcttaaaga

SEQ ID NO: 180 - RNA, 17 nt, synthetic construct
  source 1..17: mol_type = other RNA
ttattgttcctctagtt

SEQ ID NO: 181 - RNA, 17 nt, synthetic construct
  source 1..17: mol_type = other RNA
atctaactcaatgtgga

SEQ ID NO: 182 - RNA, 17 nt, synthetic construct
  source 1..17: mol_type = other RNA
ttatgatctatcgctgc

SEQ ID NO: 183 - RNA, 17 nt, synthetic construct
  source 1..17: mol_type = other RNA
acccaacaaaaaagttt

SEQ ID NO: 184 - RNA, 17 nt, synthetic construct
  source 1..17: mol_type = other RNA
catttagcattgatcta

SEQ ID NO: 185 - RNA, 17 nt, synthetic construct
  source 1..17: mol_type = other RNA
ttgttcctctagttatt

SEQ ID NO: 186 - RNA, 17 nt, synthetic construct
  source 1..17: mol_type = other RNA
tggaatggatcactgtt

SEQ ID NO: 187 - RNA, 17 nt, synthetic construct
  source 1..17: mol_type = other RNA
gtgcaagttaacacggc

SEQ ID NO: 188 - RNA, 17 nt, synthetic construct
  source 1..17: mol_type = other RNA
cagaagaaaacagttcc

SEQ ID NO: 189 - RNA, 17 nt, synthetic construct
  source 1..17: mol_type = other RNA
tttggaatggatcactg

SEQ ID NO: 190 - RNA, 17 nt, synthetic construct
  source 1..17: mol_type = other RNA
cctattaagttagttgc

SEQ ID NO: 191 - RNA, 17 nt, synthetic construct
  source 1..17: mol_type = other RNA
agaagagcaactaacta

SEQ ID NO: 192 - RNA, 17 nt, synthetic construct
  source 1..17: mol_type = other RNA
agcattgatctaactca

SEQ ID NO: 193 - RNA, 17 nt, synthetic construct
  source 1..17: mol_type = other RNA
tttcctccagaattgat

SEQ ID NO: 194 - RNA, 17 nt, synthetic construct
  source 1..17: mol_type = other RNA
ctatgttagacgatgta

SEQ ID NO: 195 - RNA, 17 nt, synthetic construct
  source 1..17: mol_type = other RNA
ccctcaactttaataat

SEQ ID NO: 196 - RNA, 17 nt, synthetic construct
  source 1..17: mol_type = other RNA
acaattaagctccttct

SEQ ID NO: 197 - RNA, 17 nt, synthetic construct
  source 1..17: mol_type = other RNA
agctccttctttttatt

SEQ ID NO: 198 - RNA, 17 nt, synthetic construct
  source 1..17: mol_type = other RNA
aaaaacaggtagtcacc

SEQ ID NO: 199 - RNA, 17 nt, synthetic construct
  source 1..17: mol_type = other RNA
acctaccaaccttacct

SEQ ID NO: 200 - RNA, 17 nt, synthetic construct
  source 1..17: mol_type = other RNA
ccttttctgggcaaata

SEQ ID NO: 201 - RNA, 17 nt, synthetic construct
  source 1..17: mol_type = other RNA
atcaagacaattcatca

SEQ ID NO: 202 - RNA, 17 nt, synthetic construct
  source 1..17: mol_type = other RNA
aactcaactcaaaactt

SEQ ID NO: 203 - RNA, 17 nt, synthetic construct
  source 1..17: mol_type = other RNA
cttttttcccctcaact

SEQ ID NO: 204 - RNA, 17 nt, synthetic construct
  source 1..17: mol_type = other RNA
tacttcaacaaaaagtg

SEQ ID NO: 205 - RNA, 17 nt, synthetic construct
  source 1..17: mol_type = other RNA
ctctagttatttcctcc

SEQ ID NO: 206 - RNA, 17 nt, synthetic construct
  source 1..17: mol_type = other RNA
ttggaatggatcactgt

SEQ ID NO: 207 - RNA, 17 nt, synthetic construct
  source 1..17: mol_type = other RNA
cacgttgcttgaaattg

SEQ ID NO: 208 - RNA, 17 nt, synthetic construct
  source 1..17: mol_type = other RNA
tcccctcaactttaata

SEQ ID NO: 209 - RNA, 17 nt, synthetic construct
  source 1..17: mol_type = other RNA
actatgttcacctacca

SEQ ID NO: 210 - RNA, 17 nt, synthetic construct
  source 1..17: mol_type = other RNA
agttagttgctcatttc

SEQ ID NO: 211 - RNA, 17 nt, synthetic construct
  source 1..17: mol_type = other RNA
gctatgttagacgatgt

SEQ ID NO: 212 - RNA, 17 nt, synthetic construct
  source 1..17: mol_type = other RNA
cctccagaattgatcaa

SEQ ID NO: 213 - RNA, 17 nt, synthetic construct
  source 1..17: mol_type = other RNA
atgatctatcgctgcaa

SEQ ID NO: 214 - RNA, 17 nt, synthetic construct
  source 1..17: mol_type = other RNA
tctgggcaaatattggt

SEQ ID NO: 215 - RNA, 17 nt, synthetic construct
  source 1..17: mol_type = other RNA
caaaagaactaaagtac

SEQ ID NO: 216 - RNA, 17 nt, synthetic construct
  source 1..17: mol_type = other RNA
agaagtctaggtctgct

SEQ ID NO: 217 - RNA, 17 nt, synthetic construct
  source 1..17: mol_type = other RNA
gaagagcaactaactaa

SEQ ID NO: 218 - RNA, 17 nt, synthetic construct
  source 1..17: mol_type = other RNA
tgacttgtaaatctctt

SEQ ID NO: 219 - RNA, 17 nt, synthetic construct
  source 1..17: mol_type = other RNA
aaagcctcctagaagaa

SEQ ID NO: 220 - RNA, 17 nt, synthetic construct
  source 1..17: mol_type = other RNA
gacttgtaaatctctta

SEQ ID NO: 221 - RNA, 17 nt, synthetic construct
  source 1..17: mol_type = other RNA
gcattgatctaactcaa

SEQ ID NO: 222 - RNA, 17 nt, synthetic construct
  source 1..17: mol_type = other RNA
tagccaatggcctcctt

SEQ ID NO: 223 - RNA, 17 nt, synthetic construct
  source 1..17: mol_type = other RNA
gatttcatttagcattg

SEQ ID NO: 224 - RNA, 17 nt, synthetic construct
  source 1..17: mol_type = other RNA
cattcgtgcaagttaac

SEQ ID NO: 225 - RNA, 17 nt, synthetic construct
  source 1..17: mol_type = other RNA
aaaacaggtagtcacca

SEQ ID NO: 226 - RNA, 17 nt, synthetic construct
  source 1..17: mol_type = other RNA
gagaaatgcatacttaa

SEQ ID NO: 227 - RNA, 17 nt, synthetic construct
  source 1..17: mol_type = other RNA
gatcagtctttttatga

SEQ ID NO: 228 - RNA, 17 nt, synthetic construct
  source 1..17: mol_type = other RNA
tgggcaaatattggtat

SEQ ID NO: 229 - RNA, 17 nt, synthetic construct
  source 1..17: mol_type = other RNA
ttcctctagttatttcc

SEQ ID NO: 230 - RNA, 17 nt, synthetic construct
  source 1..17: mol_type = other RNA
cccctcaactttaataa

SEQ ID NO: 231 - RNA, 17 nt, synthetic construct
  source 1..17: mol_type = other RNA
ccaaaagaactaaagta

SEQ ID NO: 232 - RNA, 17 nt, synthetic construct
  source 1..17: mol_type = other RNA
ggaatggatcactgttt

SEQ ID NO: 233 - RNA, 17 nt, synthetic construct
  source 1..17: mol_type = other RNA
tgatctatcgctgcaaa

SEQ ID NO: 234 - RNA, 17 nt, synthetic construct
  source 1..17: mol_type = other RNA
tttcccctcaactttaa

SEQ ID NO: 235 - RNA, 17 nt, synthetic construct
  source 1..17: mol_type = other RNA
agttgggacatggtctt

SEQ ID NO: 236 - RNA, 17 nt, synthetic construct
  source 1..17: mol_type = other RNA
tccataagacgaagggc

SEQ ID NO: 237 - RNA, 17 nt, synthetic construct
  source 1..17: mol_type = other RNA
attctctatctccagag

SEQ ID NO: 238 - RNA, 17 nt, synthetic construct
  source 1..17: mol_type = other RNA
gttgctcatttctttga

SEQ ID NO: 239 - RNA, 17 nt, synthetic construct
  source 1..17: mol_type = other RNA
attacttttttcccctc

SEQ ID NO: 240 - RNA, 17 nt, synthetic construct
  source 1..17: mol_type = other RNA
ctgggcaaatattggta

SEQ ID NO: 241 - RNA, 17 nt, synthetic construct
  source 1..17: mol_type = other RNA
ttcccctcaactttaat

SEQ ID NO: 242 - RNA, 17 nt, synthetic construct
  source 1..17: mol_type = other RNA
gaatggatcactgtttc

SEQ ID NO: 243 - RNA, 17 nt, synthetic construct
  source 1..17: mol_type = other RNA
tatgatctatcgctgca

SEQ ID NO: 244 - RNA, 17 nt, synthetic construct
  source 1..17: mol_type = other RNA
taaaaacaggtagtcac

SEQ ID NO: 245 - RNA, 17 nt, synthetic construct
  source 1..17: mol_type = other RNA
attgttcctctagttat

SEQ ID NO: 246 - RNA, 17 nt, synthetic construct
  source 1..17: mol_type = other RNA
ctttgatttcatttagc

SEQ ID NO: 247 - RNA, 17 nt, synthetic construct
  source 1..17: mol_type = other RNA
cccaacaaaaaagttta

SEQ ID NO: 248 - RNA, 17 nt, synthetic construct
  source 1..17: mol_type = other RNA
agagccgtaacaccacc

SEQ ID NO: 249 - RNA, 17 nt, synthetic construct
  source 1..17: mol_type = other RNA
ctccagaattgatcaag

SEQ ID NO: 250 - RNA, 17 nt, synthetic construct
  source 1..17: mol_type = other RNA
agccaatggcctccttc

SEQ ID NO: 251 - RNA, 17 nt, synthetic construct
  source 1..17: mol_type = other RNA
tattgttcctctagtta

SEQ ID NO: 252 - RNA, 17 nt, synthetic construct
  source 1..17: mol_type = other RNA
gccaatggcctccttca

SEQ ID NO: 253 - RNA, 17 nt, synthetic construct
  source 1..17: mol_type = other RNA
gtccataagacgaaggg

SEQ ID NO: 254 - RNA, 17 nt, synthetic construct
  source 1..17: mol_type = other RNA
acacggcttaatgatta

SEQ ID NO: 255 - RNA, 17 nt, synthetic construct
  source 1..17: mol_type = other RNA
aagactttgtccataag

SEQ ID NO: 256 - RNA, 17 nt, synthetic construct
  source 1..17: mol_type = other RNA
gcttttaaaaacaggta

SEQ ID NO: 257 - RNA, 17 nt, synthetic construct
  source 1..17: mol_type = other RNA
ctcatttctttgatttc

SEQ ID NO: 258 - RNA, 17 nt, synthetic construct
  source 1..17: mol_type = other RNA
gattctctatctccaga

SEQ ID NO: 259 - RNA, 17 nt, synthetic construct
  source 1..17: mol_type = other RNA
tctatctccagagccaa

SEQ ID NO: 260 - RNA, 17 nt, synthetic construct
  source 1..17: mol_type = other RNA
agagagaaagtgttttt

SEQ ID NO: 261 - RNA, 17 nt, synthetic construct
  source 1..17: mol_type = other RNA
atcattaagccgtgtta

SEQ ID NO: 262 - RNA, 17 nt, synthetic construct
  source 1..17: mol_type = other RNA
gttagttgctcttctaa

SEQ ID NO: 263 - RNA, 17 nt, synthetic construct
  source 1..17: mol_type = other RNA
tggctctggagatagag

SEQ ID NO: 264 - RNA, 17 nt, synthetic construct
  source 1..17: mol_type = other RNA
acatcgtctaacatagc

SEQ ID NO: 265 - RNA, 17 nt, synthetic construct
  source 1..17: mol_type = other RNA
ttattaaagttgagggg

SEQ ID NO: 266 - RNA, 17 nt, synthetic construct
  source 1..17: mol_type = other RNA
cccagaaaaggtaaggt

SEQ ID NO: 267 - RNA, 17 nt, synthetic construct
  source 1..17: mol_type = other RNA
ttcttctttgatttcac

SEQ ID NO: 268 - RNA, 17 nt, synthetic construct
  source 1..17: mol_type = other RNA
agtatgcatttctcaaa

SEQ ID NO: 269 - RNA, 17 nt, synthetic construct
  source 1..17: mol_type = other RNA
caaaaaacactttctct

SEQ ID NO: 270 - RNA, 17 nt, synthetic construct
  source 1..17: mol_type = other RNA
gaaacagtgatccattc

SEQ ID NO: 271 - RNA, 17 nt, synthetic construct
  source 1..17: mol_type = other RNA
atatgtagttcttctca

SEQ ID NO: 272 - RNA, 17 nt, synthetic construct
  source 1..17: mol_type = other RNA
cttctggaagcagacct

SEQ ID NO: 273 - RNA, 17 nt, synthetic construct
  source 1..17: mol_type = other RNA
tctctgaagcctttctc

SEQ ID NO: 274 - RNA, 17 nt, synthetic construct
  source 1..17: mol_type = other RNA
tcaaactgtactttagt

SEQ ID NO: 275 - RNA, 17 nt, synthetic construct
  source 1..17: mol_type = other RNA
aagaccatgtcccaact

SEQ ID NO: 276 - RNA, 17 nt, synthetic construct
  source 1..17: mol_type = other RNA
cacattgagttagatca

SEQ ID NO: 277 - RNA, 17 nt, synthetic construct
  source 1..17: mol_type = other RNA
aagttttgagttgagtt

SEQ ID NO: 278 - RNA, 17 nt, synthetic construct
  source 1..17: mol_type = other RNA
cctcttcatttttgact

SEQ ID NO: 279 - RNA, 17 nt, synthetic construct
  source 1..17: mol_type = other RNA
gcccagaaaaggtaagg

SEQ ID NO: 280 - RNA, 17 nt, synthetic construct
  source 1..17: mol_type = other RNA
agttagatcaatgctaa

SEQ ID NO: 281 - RNA, 17 nt, synthetic construct
  source 1..17: mol_type = other RNA
ttccacattgagttaga

SEQ ID NO: 282 - RNA, 17 nt, synthetic construct
  source 1..17: mol_type = other RNA
ttctcagttccttttct

SEQ ID NO: 283 - RNA, 17 nt, synthetic construct
  source 1..17: mol_type = other RNA
tggacaaagtctttaag

SEQ ID NO: 284 - RNA, 17 nt, synthetic construct
  source 1..17: mol_type = other RNA
gcccttcgtcttatgga

SEQ ID NO: 285 - RNA, 17 nt, synthetic construct
  source 1..17: mol_type = other RNA
tggaagcagacctagac

SEQ ID NO: 286 - RNA, 17 nt, synthetic construct
  source 1..17: mol_type = other RNA
gctgtattataaactac

SEQ ID NO: 287 - RNA, 17 nt, synthetic construct
  source 1..17: mol_type = other RNA
cactttttgttgaagta

SEQ ID NO: 288 - RNA, 17 nt, synthetic construct
  source 1..17: mol_type = other RNA
gttgctcttctaaatat

SEQ ID NO: 289 - RNA, 17 nt, synthetic construct
  source 1..17: mol_type = other RNA
caagcaacgtggaactg

SEQ ID NO: 290 - RNA, 17 nt, synthetic construct
  source 1..17: mol_type = other RNA
actttttgttgaagtag

SEQ ID NO: 291 - RNA, 17 nt, synthetic construct
  source 1..17: mol_type = other RNA
gtaggtgaacatagtta

SEQ ID NO: 292 - RNA, 17 nt, synthetic construct
  source 1..17: mol_type = other RNA
aggggaaaaaagtaatg

SEQ ID NO: 293 - RNA, 17 nt, synthetic construct
  source 1..17: mol_type = other RNA
cagcgatagatcataaa

SEQ ID NO: 294 - RNA, 17 nt, synthetic construct
  source 1..17: mol_type = other RNA
tacatcgtctaacatag

SEQ ID NO: 295 - RNA, 17 nt, synthetic construct
  source 1..17: mol_type = other RNA
attattaaagttgaggg

SEQ ID NO: 296 - RNA, 17 nt, synthetic construct
  source 1..17: mol_type = other RNA
ttcttctaggaggcttt

SEQ ID NO: 297 - RNA, 17 nt, synthetic construct
  source 1..17: mol_type = other RNA
ggcccttcgtcttatgg

SEQ ID NO: 298 - RNA, 17 nt, synthetic construct
  source 1..17: mol_type = other RNA
agccgtgttaacttgca

SEQ ID NO: 299 - RNA, 17 nt, synthetic construct
  source 1..17: mol_type = other RNA
tccactccctcaggtgg

SEQ ID NO: 300 - RNA, 17 nt, synthetic construct
  source 1..17: mol_type = other RNA
agttgagttcaagtgac

SEQ ID NO: 301 - RNA, 17 nt, synthetic construct
  source 1..17: mol_type = other RNA
ctcaaactgtactttag

SEQ ID NO: 302 - RNA, 17 nt, synthetic construct
  source 1..17: mol_type = other RNA
agttagttagttgctct

SEQ ID NO: 303 - RNA, 17 nt, synthetic construct
  source 1..17: mol_type = other RNA
ttttggaaacagtgatc

SEQ ID NO: 304 - RNA, 17 nt, synthetic construct
  source 1..17: mol_type = other RNA
aagcaacgtggaactgt

SEQ ID NO: 305 - RNA, 17 nt, synthetic construct
  source 1..17: mol_type = other RNA
tcaatttcaagcaacgt

SEQ ID NO: 306 - RNA, 17 nt, synthetic construct
  source 1..17: mol_type = other RNA
gatttcactggtttgca

SEQ ID NO: 307 - RNA, 17 nt, synthetic construct
  source 1..17: mol_type = other RNA
gtcttatggacaaagtc

SEQ ID NO: 308 - RNA, 17 nt, synthetic construct
  source 1..17: mol_type = other RNA
catcgtctaacatagca

SEQ ID NO: 309 - RNA, 17 nt, synthetic construct
  source 1..17: mol_type = other RNA
gttcttttggaaacagt

SEQ ID NO: 310 - RNA, 17 nt, synthetic construct
  source 1..17: mol_type = other RNA
taggaggctttcaagtt

SEQ ID NO: 311 - RNA, 17 nt, synthetic construct
  source 1..17: mol_type = other RNA
gatcaatgctaaatgaa

SEQ ID NO: 312 - RNA, 17 nt, synthetic construct
  source 1..17: mol_type = other RNA
gctctggagatagagaa

SEQ ID NO: 313 - RNA, 17 nt, synthetic construct
  source 1..17: mol_type = other RNA
acttgcacgaatgtaac

SEQ ID NO: 314 - RNA, 17 nt, synthetic construct
  source 1..17: mol_type = other RNA
agttcttttggaaacag

SEQ ID NO: 315 - RNA, 17 nt, synthetic construct
  source 1..17: mol_type = other RNA
aatgctatggtgactac

SEQ ID NO: 316 - RNA, 17 nt, synthetic construct
  source 1..17: mol_type = other RNA
tcttgatcaattctgga

SEQ ID NO: 317 - RNA, 17 nt, synthetic construct
  source 1..17: mol_type = other RNA
attttggctctggagat

SEQ ID NO: 318 - RNA, 17 nt, synthetic construct
  source 1..17: mol_type = other RNA
tcttctggaagcagacc

SEQ ID NO: 319 - RNA, 17 nt, synthetic construct
  source 1..17: mol_type = other RNA
ttacatcgtctaacata

SEQ ID NO: 320 - RNA, 17 nt, synthetic construct
  source 1..17: mol_type = other RNA
gagttgagttcaagtga

SEQ ID NO: 321 - RNA, 17 nt, synthetic construct
  source 1..17: mol_type = other RNA
aagttgaggggaaaaaa

SEQ ID NO: 322 - RNA, 17 nt, synthetic construct
  source 1..17: mol_type = other RNA
tcagttccttttcttct

SEQ ID NO: 323 - RNA, 17 nt, synthetic construct
  source 1..17: mol_type = other RNA
cacgaatgtaaccttct

SEQ ID NO: 324 - RNA, 17 nt, synthetic construct
  source 1..17: mol_type = other RNA
taagagatttacaagtc

SEQ ID NO: 325 - RNA, 17 nt, synthetic construct
  source 1..17: mol_type = other RNA
ttctggaagcagaccta

SEQ ID NO: 326 - RNA, 17 nt, synthetic construct
  source 1..17: mol_type = other RNA
agagatttacaagtcaa

SEQ ID NO: 327 - RNA, 17 nt, synthetic construct
  source 1..17: mol_type = other RNA
ttaaagttgaggggaaa

SEQ ID NO: 328 - RNA, 17 nt, synthetic construct
  source 1..17: mol_type = other RNA
tcttctaggaggctttc

SEQ ID NO: 329 - RNA, 17 nt, synthetic construct
  source 1..17: mol_type = other RNA
caagttttgagttgagt

SEQ ID NO: 330 - RNA, 17 nt, synthetic construct
  source 1..17: mol_type = other RNA
ggaaacagtgatccatt

SEQ ID NO: 331 - RNA, 17 nt, synthetic construct
  source 1..17: mol_type = other RNA
ctctctgaagcctttct

SEQ ID NO: 332 - RNA, 17 nt, synthetic construct
  source 1..17: mol_type = other RNA
ggctctggagatagaga

SEQ ID NO: 333 - RNA, 17 nt, synthetic construct
  source 1..17: mol_type = other RNA
atttcactggtttgcag

SEQ ID NO: 334 - RNA, 17 nt, synthetic construct
  source 1..17: mol_type = other RNA
tttcttctaggaggctt

SEQ ID NO: 335 - RNA, 17 nt, synthetic construct
  source 1..17: mol_type = other RNA
ttctaggaggctttcaa

SEQ ID NO: 336 - RNA, 17 nt, synthetic construct
  source 1..17: mol_type = other RNA
gcagcgatagatcataa

SEQ ID NO: 337 - RNA, 17 nt, synthetic construct
  source 1..17: mol_type = other RNA
caatttcaagcaacgtg

SEQ ID NO: 338 - RNA, 17 nt, synthetic construct
  source 1..17: mol_type = other RNA
acctcttcatttttgac

SEQ ID NO: 339 - RNA, 17 nt, synthetic construct
  source 1..17: mol_type = other RNA
tggaaacagtgatccat

SEQ ID NO: 340 - RNA, 17 nt, synthetic construct
  source 1..17: mol_type = other RNA
tatgtagttcttctcag

SEQ ID NO: 341 - RNA, 17 nt, synthetic construct
  source 1..17: mol_type = other RNA
cactggtttgcagcgat

SEQ ID NO: 342 - RNA, 17 nt, synthetic construct
  source 1..17: mol_type = other RNA
atcaattctggaggaaa

SEQ ID NO: 343 - RNA, 17 nt, synthetic construct
  source 1..17: mol_type = other RNA
atttggcccttcgtctt

SEQ ID NO: 344 - RNA, 17 nt, synthetic construct
  source 1..17: mol_type = other RNA
gacttgtagtttatatg

SEQ ID NO: 345 - RNA, 17 nt, synthetic construct
  source 1..17: mol_type = other RNA
tgagttgagttcaagtg

SEQ ID NO: 346 - RNA, 17 nt, synthetic construct
  source 1..17: mol_type = other RNA
cttctaggaggctttca

SEQ ID NO: 347 - RNA, 17 nt, synthetic construct
  source 1..17: mol_type = other RNA
tggaggaaataactaga

SEQ ID NO: 348 - RNA, 17 nt, synthetic construct
  source 1..17: mol_type = other RNA
agttcaagtgacatatt

SEQ ID NO: 349 - RNA, 17 nt, synthetic construct
  source 1..17: mol_type = other RNA
actggtttgcagcgata

SEQ ID NO: 350 - RNA, 17 nt, synthetic construct
  source 1..17: mol_type = other RNA
tttgatttcactggttt

SEQ ID NO: 351 - RNA, 17 nt, synthetic construct
  source 1..17: mol_type = other RNA
cttcttctttgatttca

SEQ ID NO: 352 - RNA, 17 nt, synthetic construct
  source 1..17: mol_type = other RNA
ttctttgatttcactgg

SEQ ID NO: 353 - RNA, 17 nt, synthetic construct
  source 1..17: mol_type = other RNA
cggctctcaatgctgtg

SEQ ID NO: 354 - RNA, 17 nt, synthetic construct
  source 1..17: mol_type = other RNA
aagagatttacaagtca

SEQ ID NO: 355 - RNA, 17 nt, synthetic construct
  source 1..17: mol_type = other RNA
ctccactccctcaggtg

SEQ ID NO: 356 - RNA, 17 nt, synthetic construct
  source 1..17: mol_type = other RNA
tcttcttctttgatttc

SEQ ID NO: 357 - RNA, 17 nt, synthetic construct
  source 1..17: mol_type = other RNA
agaccatgtcccaactg

SEQ ID NO: 358 - RNA, 17 nt, synthetic construct
  source 1..17: mol_type = other RNA
cttttcttcttctttga

SEQ ID NO: 359 - RNA, 17 nt, synthetic construct
  source 1..17: mol_type = other RNA
aatttcaagcaacgtgg

SEQ ID NO: 360 - RNA, 17 nt, synthetic construct
  source 1..17: mol_type = other RNA
tcccactgatattagat

SEQ ID NO: 361 - RNA, 17 nt, synthetic construct
  source 1..17: mol_type = other RNA
tggcccatagcctccct

SEQ ID NO: 362 - RNA, 17 nt, synthetic construct
  source 1..17: mol_type = other RNA
caggcagctctgccact

SEQ ID NO: 363 - RNA, 17 nt, synthetic construct
  source 1..17: mol_type = other RNA
cagtagaatggaatggg

SEQ ID NO: 364 - RNA, 17 nt, synthetic construct
  source 1..17: mol_type = other RNA
tattggctccaggatgg

SEQ ID NO: 365 - RNA, 17 nt, synthetic construct
  source 1..17: mol_type = other RNA
cttcctctcctccccag

SEQ ID NO: 366 - RNA, 17 nt, synthetic construct
  source 1..17: mol_type = other RNA
cagtcctgggtaggcat

SEQ ID NO: 367 - RNA, 17 nt, synthetic construct
  source 1..17: mol_type = other RNA
cctggagtagctagctg

SEQ ID NO: 368 - RNA, 17 nt, synthetic construct
  source 1..17: mol_type = other RNA
cccagcttctagccccc

SEQ ID NO: 369 - RNA, 17 nt, synthetic construct
  source 1..17: mol_type = other RNA
tccctccagctctttgt

SEQ ID NO: 370 - RNA, 17 nt, synthetic construct
  source 1..17: mol_type = other RNA
ccttccttcctctcctc

SEQ ID NO: 371 - RNA, 17 nt, synthetic construct
  source 1..17: mol_type = other RNA
ctcgctaggactcagtt

SEQ ID NO: 372 - RNA, 17 nt, synthetic construct
  source 1..17: mol_type = other RNA
agaaatccctctgagat

SEQ ID NO: 373 - RNA, 17 nt, synthetic construct
  source 1..17: mol_type = other RNA
gtttcttcccttccttc

SEQ ID NO: 374 - RNA, 17 nt, synthetic construct
  source 1..17: mol_type = other RNA
ttcagtcctgggtaggc

SEQ ID NO: 375 - RNA, 17 nt, synthetic construct
  source 1..17: mol_type = other RNA
cccatgcttttcacggc

SEQ ID NO: 376 - RNA, 17 nt, synthetic construct
  source 1..17: mol_type = other RNA
ttcccttccttcctctc

SEQ ID NO: 377 - RNA, 17 nt, synthetic construct
  source 1..17: mol_type = other RNA
catgcccccacactgac

SEQ ID NO: 378 - RNA, 17 nt, synthetic construct
  source 1..17: mol_type = other RNA
cttttcctcgctaggac

SEQ ID NO: 379 - RNA, 17 nt, synthetic construct
  source 1..17: mol_type = other RNA
cctcgctaggactcagt

SEQ ID NO: 380 - RNA, 17 nt, synthetic construct
  source 1..17: mol_type = other RNA
tatattggctccaggat

SEQ ID NO: 381 - RNA, 17 nt, synthetic construct
  source 1..17: mol_type = other RNA
gctccaggatgggacag

SEQ ID NO: 382 - RNA, 17 nt, synthetic construct
  source 1..17: mol_type = other RNA
cacggccacctccgcca

SEQ ID NO: 383 - RNA, 17 nt, synthetic construct
  source 1..17: mol_type = other RNA
tagccccccccacacca

SEQ ID NO: 384 - RNA, 17 nt, synthetic construct
  source 1..17: mol_type = other RNA
tttcagtcctgggtagg

SEQ ID NO: 385 - RNA, 17 nt, synthetic construct
  source 1..17: mol_type = other RNA
ggcccatagcctccctt

SEQ ID NO: 386 - RNA, 17 nt, synthetic construct
  source 1..17: mol_type = other RNA
cttcccttccttcctct

SEQ ID NO: 387 - RNA, 17 nt, synthetic construct
  source 1..17: mol_type = other RNA
gacctcaggcctgcttt

SEQ ID NO: 388 - RNA, 17 nt, synthetic construct
  source 1..17: mol_type = other RNA
ccccagcttctagcccc

SEQ ID NO: 389 - RNA, 17 nt, synthetic construct
  source 1..17: mol_type = other RNA
tttcttcccttccttcc

SEQ ID NO: 390 - RNA, 17 nt, synthetic construct
  source 1..17: mol_type = other RNA
tagggataaaactgagc

SEQ ID NO: 391 - RNA, 17 nt, synthetic construct
  source 1..17: mol_type = other RNA
atattggctccaggatg

SEQ ID NO: 392 - RNA, 17 nt, synthetic construct
  source 1..17: mol_type = other RNA
acggccacctccgccac

SEQ ID NO: 393 - RNA, 17 nt, synthetic construct
  source 1..17: mol_type = other RNA
acagcctagagccagtg

SEQ ID NO: 394 - RNA, 17 nt, synthetic construct
  source 1..17: mol_type = other RNA
acagaagccacctgaaa

SEQ ID NO: 395 - RNA, 17 nt, synthetic construct
  source 1..17: mol_type = other RNA
tcagtcctgggtaggca

SEQ ID NO: 396 - RNA, 17 nt, synthetic construct
  source 1..17: mol_type = other RNA
tcacggccacctccgcc

SEQ ID NO: 397 - RNA, 17 nt, synthetic construct
  source 1..17: mol_type = other RNA
tcctcgctaggactcag

SEQ ID NO: 398 - RNA, 17 nt, synthetic construct
  source 1..17: mol_type = other RNA
ctcccactgatattaga

SEQ ID NO: 399 - RNA, 17 nt, synthetic construct
  source 1..17: mol_type = other RNA
ttttcctcgctaggact

SEQ ID NO: 400 - RNA, 17 nt, synthetic construct
  source 1..17: mol_type = other RNA
tgtgggctagatggctg

SEQ ID NO: 401 - RNA, 17 nt, synthetic construct
  source 1..17: mol_type = other RNA
gcccatagcctcccttt

SEQ ID NO: 402 - RNA, 17 nt, synthetic construct
  source 1..17: mol_type = other RNA
taatagctcagagcaag

SEQ ID NO: 403 - RNA, 17 nt, synthetic construct
  source 1..17: mol_type = other RNA
agtcctgggtaggcatg

SEQ ID NO: 404 - RNA, 17 nt, synthetic construct
  source 1..17: mol_type = other RNA
cagcctagagccagtga

SEQ ID NO: 405 - RNA, 17 nt, synthetic construct
  source 1..17: mol_type = other RNA
ctctcctccccaggggc

SEQ ID NO: 406 - RNA, 17 nt, synthetic construct
  source 1..17: mol_type = other RNA
gatagagaactacagta

SEQ ID NO: 407 - RNA, 17 nt, synthetic construct
  source 1..17: mol_type = other RNA
gtggcggaggtggccgt

SEQ ID NO: 408 - RNA, 17 nt, synthetic construct
  source 1..17: mol_type = other RNA
ggtcatgctgtcccttg

SEQ ID NO: 409 - RNA, 17 nt, synthetic construct
  source 1..17: mol_type = other RNA
ggttcctggtgtggggg

SEQ ID NO: 410 - RNA, 17 nt, synthetic construct
  source 1..17: mol_type = other RNA
tcagcatattagagtag

SEQ ID NO: 411 - RNA, 17 nt, synthetic construct
  source 1..17: mol_type = other RNA
tatccctagaagcagct

SEQ ID NO: 412 - RNA, 17 nt, synthetic construct
  source 1..17: mol_type = other RNA
tctatctaatatcagtg

SEQ ID NO: 413 - RNA, 17 nt, synthetic construct
  source 1..17: mol_type = other RNA
ctatactccaccttcca

SEQ ID NO: 414 - RNA, 17 nt, synthetic construct
  source 1..17: mol_type = other RNA
cccattccattctactg

SEQ ID NO: 415 - RNA, 17 nt, synthetic construct
  source 1..17: mol_type = other RNA
ctccgttgctccacagt

SEQ ID NO: 416 - RNA, 17 nt, synthetic construct
  source 1..17: mol_type = other RNA
tcccctgtcttttcctg

SEQ ID NO: 417 - RNA, 17 nt, synthetic construct
  source 1..17: mol_type = other RNA
atccctagaagcagcta

SEQ ID NO: 418 - RNA, 17 nt, synthetic construct
  source 1..17: mol_type = other RNA
caccccacttggggggc

SEQ ID NO: 419 - RNA, 17 nt, synthetic construct
  source 1..17: mol_type = other RNA
tttctcagcatattaga

SEQ ID NO: 420 - RNA, 17 nt, synthetic construct
  source 1..17: mol_type = other RNA
caggtggcttctgtgaa

SEQ ID NO: 421 - RNA, 17 nt, synthetic construct
  source 1..17: mol_type = other RNA
cccagctcactgggcct

SEQ ID NO: 422 - RNA, 17 nt, synthetic construct
  source 1..17: mol_type = other RNA
ctcagcatattagagta

SEQ ID NO: 423 - RNA, 17 nt, synthetic construct
  source 1..17: mol_type = other RNA
cattctactggaaggct

SEQ ID NO: 424 - RNA, 17 nt, synthetic construct
  source 1..17: mol_type = other RNA
tcctgtctcaccgacct

SEQ ID NO: 425 - RNA, 17 nt, synthetic construct
  source 1..17: mol_type = other RNA
gtatccatgcctaccca

SEQ ID NO: 426 - RNA, 17 nt, synthetic construct
  source 1..17: mol_type = other RNA
aggtggcttctgtgaag

SEQ ID NO: 427 - RNA, 17 nt, synthetic construct
  source 1..17: mol_type = other RNA
ggatcacaggtggaggt

SEQ ID NO: 428 - RNA, 17 nt, synthetic construct
  source 1..17: mol_type = other RNA
tttagcttgctctgagc

SEQ ID NO: 429 - RNA, 17 nt, synthetic construct
  source 1..17: mol_type = other RNA
gaagcctttggtatcca

SEQ ID NO: 430 - RNA, 17 nt, synthetic construct
  source 1..17: mol_type = other RNA
ctgtctcaccgacctca

SEQ ID NO: 431 - RNA, 17 nt, synthetic construct
  source 1..17: mol_type = other RNA
tgtgaaggagcctgtca

SEQ ID NO: 432 - RNA, 17 nt, synthetic construct
  source 1..17: mol_type = other RNA
actctgccccctcccac

SEQ ID NO: 433 - RNA, 17 nt, synthetic construct
  source 1..17: mol_type = other RNA
tctcactaatccctgcc

SEQ ID NO: 434 - RNA, 17 nt, synthetic construct
  source 1..17: mol_type = other RNA
tactggaaggctttcag

SEQ ID NO: 435 - RNA, 17 nt, synthetic construct
  source 1..17: mol_type = other RNA
tatactccaccttccac

SEQ ID NO: 436 - RNA, 17 nt, synthetic construct
  source 1..17: mol_type = other RNA
gcccagctcactgggcc

SEQ ID NO: 437 - RNA, 17 nt, synthetic construct
  source 1..17: mol_type = other RNA
ctctgagctattagaag

SEQ ID NO: 438 - RNA, 17 nt, synthetic construct
  source 1..17: mol_type = other RNA
gggggctgggtctactg

SEQ ID NO: 439 - RNA, 17 nt, synthetic construct
  source 1..17: mol_type = other RNA
ggattcatgacccagga

SEQ ID NO: 440 - RNA, 17 nt, synthetic construct
  source 1..17: mol_type = other RNA
cctgctcagttttatcc

SEQ ID NO: 441 - RNA, 17 nt, synthetic construct
  source 1..17: mol_type = other RNA
ctcaactcctctggcag

SEQ ID NO: 442 - RNA, 17 nt, synthetic construct
  source 1..17: mol_type = other RNA
ctgcctcaggctctggt

SEQ ID NO: 443 - RNA, 17 nt, synthetic construct
  source 1..17: mol_type = other RNA
tgtgcccgctgtcccat

SEQ ID NO: 444 - RNA, 17 nt, synthetic construct
  source 1..17: mol_type = other RNA
tccttctctcactaatc

SEQ ID NO: 445 - RNA, 17 nt, synthetic construct
  source 1..17: mol_type = other RNA
gcttgctctgagctatt

SEQ ID NO: 446 - RNA, 17 nt, synthetic construct
  source 1..17: mol_type = other RNA
tcaactcctctggcaga

SEQ ID NO: 447 - RNA, 17 nt, synthetic construct
  source 1..17: mol_type = other RNA
cctgtctcaccgacctc

SEQ ID NO: 448 - RNA, 17 nt, synthetic construct
  source 1..17: mol_type = other RNA
ctccacagtggcaccac

SEQ ID NO: 449 - RNA, 17 nt, synthetic construct
  source 1..17: mol_type = other RNA
tccctagaagcagctag

SEQ ID NO: 450 - RNA, 17 nt, synthetic construct
  source 1..17: mol_type = other RNA
ggactcatggtctccac

SEQ ID NO: 451 - RNA, 17 nt, synthetic construct
  source 1..17: mol_type = other RNA
agcttgctctgagctat

SEQ ID NO: 452 - RNA, 17 nt, synthetic construct
  source 1..17: mol_type = other RNA
ggtatccatgcctaccc

SEQ ID NO: 453 - RNA, 17 nt, synthetic construct
  source 1..17: mol_type = other RNA
ctggtgtggggggggct

SEQ ID NO: 454 - RNA, 17 nt, synthetic construct
  source 1..17: mol_type = other RNA
cactgggtagtggcaga

SEQ ID NO: 455 - RNA, 17 nt, synthetic construct
  source 1..17: mol_type = other RNA
tgcagagtatttctata

SEQ ID NO: 456 - RNA, 17 nt, synthetic construct
  source 1..17: mol_type = other RNA
gagtagatgtcccgttc

SEQ ID NO: 457 - RNA, 17 nt, synthetic construct
  source 1..17: mol_type = other RNA
cggggtctcccagccac

SEQ ID NO: 458 - RNA, 17 nt, synthetic construct
  source 1..17: mol_type = other RNA
gagcaacggcggaaggt

SEQ ID NO: 459 - RNA, 17 nt, synthetic construct
  source 1..17: mol_type = other RNA
tccctccaacaatatta

SEQ ID NO: 460 - RNA, 17 nt, synthetic construct
  source 1..17: mol_type = other RNA
actgcgtggagtgccga

SEQ ID NO: 461 - RNA, 17 nt, synthetic construct
  source 1..17: mol_type = other RNA
agcatttccggggtctc

SEQ ID NO: 462 - RNA, 17 nt, synthetic construct
  source 1..17: mol_type = other RNA
cattcccccctcttaat

SEQ ID NO: 463 - RNA, 17 nt, synthetic construct
  source 1..17: mol_type = other RNA
aacattaacgggccccg

SEQ ID NO: 464 - RNA, 17 nt, synthetic construct
  source 1..17: mol_type = other RNA
ccccctcttaatcccca

SEQ ID NO: 465 - RNA, 17 nt, synthetic construct
  source 1..17: mol_type = other RNA
cactccatccagcctgt

SEQ ID NO: 466 - RNA, 17 nt, synthetic construct
  source 1..17: mol_type = other RNA
tcctgggccctcctcct

SEQ ID NO: 467 - RNA, 17 nt, synthetic construct
  source 1..17: mol_type = other RNA
gagaccaccagacggct

SEQ ID NO: 468 - RNA, 17 nt, synthetic construct
  source 1..17: mol_type = other RNA
gctccggggctgcgggc

SEQ ID NO: 469 - RNA, 17 nt, synthetic construct
  source 1..17: mol_type = other RNA
ccggggtctcccagcca

SEQ ID NO: 470 - RNA, 17 nt, synthetic construct
  source 1..17: mol_type = other RNA
ggctcacctgcacccta

SEQ ID NO: 471 - RNA, 17 nt, synthetic construct
  source 1..17: mol_type = other RNA
ccgctacctgcctaaac

SEQ ID NO: 472 - RNA, 17 nt, synthetic construct
  source 1..17: mol_type = other RNA
gcactccatccagcctg

SEQ ID NO: 473 - RNA, 17 nt, synthetic construct
  source 1..17: mol_type = other RNA
acgggccccggtactaa

SEQ ID NO: 474 - RNA, 17 nt, synthetic construct
  source 1..17: mol_type = other RNA
ataatctccatcctcgt

SEQ ID NO: 475 - RNA, 17 nt, synthetic construct
  source 1..17: mol_type = other RNA
atccccactccaatcct

SEQ ID NO: 476 - RNA, 17 nt, synthetic construct
  source 1..17: mol_type = other RNA
gcatttccggggtctcc

SEQ ID NO: 477 - RNA, 17 nt, synthetic construct
  source 1..17: mol_type = other RNA
actaacttctcctgggc

SEQ ID NO: 478 - RNA, 17 nt, synthetic construct
  source 1..17: mol_type = other RNA
cggcctcgccctcccca

SEQ ID NO: 479 - RNA, 17 nt, synthetic construct
  source 1..17: mol_type = other RNA
cctccctggcctccagc

SEQ ID NO: 480 - RNA, 17 nt, synthetic construct
  source 1..17: mol_type = other RNA
tggggtgtgggtactgg

SEQ ID NO: 481 - RNA, 17 nt, synthetic construct
  source 1..17: mol_type = other RNA
ggctgcaaacgggacct

SEQ ID NO: 482 - RNA, 17 nt, synthetic construct
  source 1..17: mol_type = other RNA
ccgacttcccgctacct

SEQ ID NO: 483 - RNA, 17 nt, synthetic construct
  source 1..17: mol_type = other RNA
cctggcacccatacctt

SEQ ID NO: 484 - RNA, 17 nt, synthetic construct
  source 1..17: mol_type = other RNA
ggcctcgccctccccag

SEQ ID NO: 485 - RNA, 17 nt, synthetic construct
  source 1..17: mol_type = other RNA
tctgctcatctagccgt

SEQ ID NO: 486 - RNA, 17 nt, synthetic construct
  source 1..17: mol_type = other RNA
ccgaggccgcgcgcacc

SEQ ID NO: 487 - RNA, 17 nt, synthetic construct
  source 1..17: mol_type = other RNA
ctttggggttggggtga

SEQ ID NO: 488 - RNA, 17 nt, synthetic construct
  source 1..17: mol_type = other RNA
agtaccggggcccgtta

SEQ ID NO: 489 - RNA, 17 nt, synthetic construct
  source 1..17: mol_type = other RNA
ctccaaggtatgggtgc

SEQ ID NO: 490 - RNA, 17 nt, synthetic construct
  source 1..17: mol_type = other RNA
tctctctctttctgagg

SEQ ID NO: 491 - RNA, 17 nt, synthetic construct
  source 1..17: mol_type = other RNA
ggggttttgtcctcact

SEQ ID NO: 492 - RNA, 17 nt, synthetic construct
  source 1..17: mol_type = other RNA
atattgttggagggaga

SEQ ID NO: 493 - RNA, 17 nt, synthetic construct
  source 1..17: mol_type = other RNA
acgctgtctggggaggg

SEQ ID NO: 494 - RNA, 17 nt, synthetic construct
  source 1..17: mol_type = other RNA
agaggggggaatgtaac

SEQ ID NO: 495 - RNA, 17 nt, synthetic construct
  source 1..17: mol_type = other RNA
gggttggggtgatgctc

SEQ ID NO: 496 - RNA, 17 nt, synthetic construct
  source 1..17: mol_type = other RNA
cagcccaattaggattt

SEQ ID NO: 497 - RNA, 17 nt, synthetic construct
  source 1..17: mol_type = other RNA
gagggagaagtacaggg

SEQ ID NO: 498 - RNA, 17 nt, synthetic construct
  source 1..17: mol_type = other RNA
ctgaggctagaggactg

SEQ ID NO: 499 - RNA, 17 nt, synthetic construct
  source 1..17: mol_type = other RNA
tgaggctagaggactga

SEQ ID NO: 500 - RNA, 17 nt, synthetic construct
  source 1..17: mol_type = other RNA
ccgctgttgccgccgct

SEQ ID NO: 501 - RNA, 17 nt, synthetic construct
  source 1..17: mol_type = other RNA
gctccccagagacatca

SEQ ID NO: 502 - RNA, 17 nt, synthetic construct
  source 1..17: mol_type = other RNA
acgtggacgcgcaggct

SEQ ID NO: 503 - RNA, 17 nt, synthetic construct
  source 1..17: mol_type = other RNA
ttggagggagaagtaca

SEQ ID NO: 504 - RNA, 17 nt, synthetic construct
  source 1..17: mol_type = other RNA
cgccgttgctccaaggt

SEQ ID NO: 505 - RNA, 17 nt, synthetic construct
  source 1..17: mol_type = other RNA
gcaccccgcctgaggag

SEQ ID NO: 506 - RNA, 17 nt, synthetic construct
  source 1..17: mol_type = other RNA
tgaagagctgatgctcg

SEQ ID NO: 507 - RNA, 17 nt, synthetic construct
  source 1..17: mol_type = other RNA
ccgccgctgctgctgct

SEQ ID NO: 508 - RNA, 17 nt, synthetic construct
  source 1..17: mol_type = other RNA
ctgctactgtgccccac

SEQ ID NO: 509 - RNA, 17 nt, synthetic construct
  source 1..17: mol_type = other RNA
tgtcctcactctgagcg

SEQ ID NO: 510 - RNA, 17 nt, synthetic construct
  source 1..17: mol_type = other RNA
aggcaggtagcgggaag

SEQ ID NO: 511 - RNA, 17 nt, synthetic construct
  source 1..17: mol_type = other RNA
ggcaggtagcgggaagt

SEQ ID NO: 512 - RNA, 17 nt, synthetic construct
  source 1..17: mol_type = other RNA
gtaccggggcccgttaa

SEQ ID NO: 513 - RNA, 17 nt, synthetic construct
  source 1..17: mol_type = other RNA
aatcagagaggatcttc

SEQ ID NO: 514 - RNA, 17 nt, synthetic construct
  source 1..17: mol_type = other RNA
gggttttgtcctcactc

SEQ ID NO: 515 - RNA, 17 nt, synthetic construct
  source 1..17: mol_type = other RNA
caccttcacgtggacgc

SEQ ID NO: 516 - RNA, 17 nt, synthetic construct
  source 1..17: mol_type = other RNA
atcagagaggatcttcc

SEQ ID NO: 517 - RNA, 17 nt, synthetic construct
  source 1..17: mol_type = other RNA
tcctcactctgagcgtc

SEQ ID NO: 518 - RNA, 17 nt, synthetic construct
  source 1..17: mol_type = other RNA
ggatttggggttttgtc

SEQ ID NO: 519 - RNA, 17 nt, synthetic construct
  source 1..17: mol_type = other RNA
ggggttggggtgatgct

SEQ ID NO: 520 - RNA, 17 nt, synthetic construct
  source 1..17: mol_type = other RNA
gggggtcttctctgctc

SEQ ID NO: 521 - RNA, 17 nt, synthetic construct
  source 1..17: mol_type = other RNA
gcagcccaattaggatt

SEQ ID NO: 522 - RNA, 17 nt, synthetic construct
  source 1..17: mol_type = other RNA
gacgctgtctggggagg

SEQ ID NO: 523 - RNA, 17 nt, synthetic construct
  source 1..17: mol_type = other RNA
gggtgatgctcttcggg

SEQ ID NO: 524 - RNA, 17 nt, synthetic construct
  source 1..17: mol_type = other RNA
gtcctcactctgagcgt

SEQ ID NO: 525 - RNA, 17 nt, synthetic construct
  source 1..17: mol_type = other RNA
cgatggggctcggggtg

SEQ ID NO: 526 - RNA, 17 nt, synthetic construct
  source 1..17: mol_type = other RNA
atgtttaatcagagagg

SEQ ID NO: 527 - RNA, 17 nt, synthetic construct
  source 1..17: mol_type = other RNA
gttaatattgttggagg

SEQ ID NO: 528 - RNA, 17 nt, synthetic construct
  source 1..17: mol_type = other RNA
gagtggggattaagagg

SEQ ID NO: 529 - RNA, 41 nt, synthetic construct
  source 1..41: mol_type = other RNA
atagattgctccttacgaggagaccccaactctcccgcccg

SEQ ID NO: 530 - RNA, 41 nt, synthetic construct
  source 1..41: mol_type = other RNA
atagattgctccttacgaggagacaggcttagggctggagg

SEQ ID NO: 531 - RNA, 41 nt, synthetic construct
  source 1..41: mol_type = other RNA
atagattgctccttacgaggagacccctctcaccagcctct

SEQ ID NO: 532 - RNA, 41 nt, synthetic construct
  source 1..41: mol_type = other RNA
atagattgctccttacgaggagacagggcttggggctggtg

SEQ ID NO: 533 - RNA, 41 nt, synthetic construct
  source 1..41: mol_type = other RNA
atagattgctccttacgaggagacctccaaacaccccccag

SEQ ID NO: 534 - RNA, 41 nt, synthetic construct
  source 1..41: mol_type = other RNA
atagattgctccttacgaggagacgggctggaggaagcctt

SEQ ID NO: 535 - RNA, 41 nt, synthetic construct
  source 1..41: mol_type = other RNA
atagattgctccttacgaggagacccaactctcccgcccgc

SEQ ID NO: 536 - RNA, 41 nt, synthetic construct
  source 1..41: mol_type = other RNA
atagattgctccttacgaggagacgctggactggacggaga

SEQ ID NO: 537 - RNA, 41 nt, synthetic construct
  source 1..41: mol_type = other RNA
atagattgctccttacgaggagactctgctccatcccaccc

SEQ ID NO: 538 - RNA, 41 nt, synthetic construct
  source 1..41: mol_type = other RNA
atagattgctccttacgaggagaccccagcgccctgggtcc

SEQ ID NO: 539 - RNA, 41 nt, synthetic construct
  source 1..41: mol_type = other RNA
atagattgctccttacgaggagactgtgcctttactccaaa

SEQ ID NO: 540 - RNA, 41 nt, synthetic construct
  source 1..41: mol_type = other RNA
atagattgctccttacgaggagacctgcatctggacaccct

SEQ ID NO: 541 - RNA, 41 nt, synthetic construct
  source 1..41: mol_type = other RNA
atagattgctccttacgaggagacctagagctaaggaagcc

SEQ ID NO: 542 - RNA, 41 nt, synthetic construct
  source 1..41: mol_type = other RNA
atagattgctccttacgaggagacgcccagcgccctgggtc

SEQ ID NO: 543 - RNA, 41 nt, synthetic construct
  source 1..41: mol_type = other RNA
atagattgctccttacgaggagaccagtgtgaaaggctgag

SEQ ID NO: 544 - RNA, 41 nt, synthetic construct
  source 1..41: mol_type = other RNA
atagattgctccttacgaggagacttcaggcttagggctgg

SEQ ID NO: 545 - RNA, 41 nt, synthetic construct
  source 1..41: mol_type = other RNA
atagattgctccttacgaggagacgggcctcgatccctcgc

SEQ ID NO: 546 - RNA, 41 nt, synthetic construct
  source 1..41: mol_type = other RNA
atagattgctccttacgaggagacactccaaacacccccca

SEQ ID NO: 547 - RNA, 41 nt, synthetic construct
  source 1..41: mol_type = other RNA
atagattgctccttacgaggagacagtctggtgggttttct

SEQ ID NO: 548 - RNA, 41 nt, synthetic construct
  source 1..41: mol_type = other RNA
atagattgctccttacgaggagaccccaaagctacacaggg

SEQ ID NO: 549 - RNA, 41 nt, synthetic construct
  source 1..41: mol_type = other RNA
atagattgctccttacgaggagactgctccatcccacccac

SEQ ID NO: 550 - RNA, 41 nt, synthetic construct
  source 1..41: mol_type = other RNA
atagattgctccttacgaggagacatgttcagtctggtggg

SEQ ID NO: 551 - RNA, 41 nt, synthetic construct
  source 1..41: mol_type = other RNA
atagattgctccttacgaggagacctgctccatcccaccca

SEQ ID NO: 552 - RNA, 41 nt, synthetic construct
  source 1..41: mol_type = other RNA
atagattgctccttacgaggagacatccctagaggcagctg

SEQ ID NO: 553 - RNA, 41 nt, synthetic construct
  source 1..41: mol_type = other RNA
atagattgctccttacgaggagacgacagcccagtcctacc

SEQ ID NO: 554 - RNA, 41 nt, synthetic construct
  source 1..41: mol_type = other RNA
atagattgctccttacgaggagacgggctggtggagggagg

SEQ ID NO: 555 - RNA, 41 nt, synthetic construct
  source 1..41: mol_type = other RNA
atagattgctccttacgaggagacctgagctcatctgggct

SEQ ID NO: 556 - RNA, 41 nt, synthetic construct
  source 1..41: mol_type = other RNA
atagattgctccttacgaggagacggcctcgatccctcgcc

SEQ ID NO: 557 - RNA, 41 nt, synthetic construct
  source 1..41: mol_type = other RNA
atagattgctccttacgaggagactcaagtctgaagaagcc

SEQ ID NO: 558 - RNA, 41 nt, synthetic construct
  source 1..41: mol_type = other RNA
atagattgctccttacgaggagaccccctctcaccagcctc

SEQ ID NO: 559 - RNA, 41 nt, synthetic construct
  source 1..41: mol_type = other RNA
atagattgctccttacgaggagacttctcaagtctgaagaa

SEQ ID NO: 560 - RNA, 41 nt, synthetic construct
  source 1..41: mol_type = other RNA
atagattgctccttacgaggagacccccctcattcttcagg

SEQ ID NO: 561 - RNA, 41 nt, synthetic construct
  source 1..41: mol_type = other RNA
atagattgctccttacgaggagacggctggggggtgtttgg

SEQ ID NO: 562 - RNA, 41 nt, synthetic construct
  source 1..41: mol_type = other RNA
atagattgctccttacgaggagacggaaatccctaggagac

SEQ ID NO: 563 - RNA, 41 nt, synthetic construct
  source 1..41: mol_type = other RNA
atagattgctccttacgaggagacagaacaagtgggtggct

SEQ ID NO: 564 - RNA, 41 nt, synthetic construct
  source 1..41: mol_type = other RNA
atagattgctccttacgaggagactatcatctccagggcag

SEQ ID NO: 565 - RNA, 41 nt, synthetic construct
  source 1..41: mol_type = other RNA
atagattgctccttacgaggagaccaggcccctccctccac

SEQ ID NO: 566 - RNA, 41 nt, synthetic construct
  source 1..41: mol_type = other RNA
atagattgctccttacgaggagaccctggagcagctgcctc

SEQ ID NO: 567 - RNA, 41 nt, synthetic construct
  source 1..41: mol_type = other RNA
atagattgctccttacgaggagacaggttatgatgaggggt

SEQ ID NO: 568 - RNA, 41 nt, synthetic construct
  source 1..41: mol_type = other RNA
atagattgctccttacgaggagacctggctgggctgggcag

SEQ ID NO: 569 - RNA, 41 nt, synthetic construct
  source 1..41: mol_type = other RNA
atagattgctccttacgaggagacctagctgactggctccc

SEQ ID NO: 570 - RNA, 41 nt, synthetic construct
  source 1..41: mol_type = other RNA
atagattgctccttacgaggagacttcagacttgagaacaa

SEQ ID NO: 571 - RNA, 41 nt, synthetic construct
  source 1..41: mol_type = other RNA
atagattgctccttacgaggagacgagtaaaggcacagaag

SEQ ID NO: 572 - RNA, 41 nt, synthetic construct
  source 1..41: mol_type = other RNA
atagattgctccttacgaggagacggcaagtgacacccctc

SEQ ID NO: 573 - RNA, 41 nt, synthetic construct
  source 1..41: mol_type = other RNA
atagattgctccttacgaggagactgatgaggggtgggggg

SEQ ID NO: 574 - RNA, 41 nt, synthetic construct
  source 1..41: mol_type = other RNA
atagattgctccttacgaggagactggccctctccaggcct

SEQ ID NO: 575 - RNA, 41 nt, synthetic construct
  source 1..41: mol_type = other RNA
atagattgctccttacgaggagacttcaggttatgatgagg

SEQ ID NO: 576 - RNA, 41 nt, synthetic construct
  source 1..41: mol_type = other RNA
atagattgctccttacgaggagactatatcatctccagggc

SEQ ID NO: 577 - RNA, 41 nt, synthetic construct
  source 1..41: mol_type = other RNA
atagattgctccttacgaggagacccctccccagagggcat

SEQ ID NO: 578 - RNA, 41 nt, synthetic construct
  source 1..41: mol_type = other RNA
atagattgctccttacgaggagaccccctcttcatcctcct

SEQ ID NO: 579 - RNA, 41 nt, synthetic construct
  source 1..41: mol_type = other RNA
atagattgctccttacgaggagactccaggcttgctggctg

SEQ ID NO: 580 - RNA, 41 nt, synthetic construct
  source 1..41: mol_type = other RNA
atagattgctccttacgaggagaccacactggaatttcagg

SEQ ID NO: 581 - RNA, 41 nt, synthetic construct
  source 1..41: mol_type = other RNA
atagattgctccttacgaggagaccctgtctggggtaggac

SEQ ID NO: 582 - RNA, 41 nt, synthetic construct
  source 1..41: mol_type = other RNA
atagattgctccttacgaggagacgctctagcaagtgcttc

SEQ ID NO: 583 - RNA, 41 nt, synthetic construct
  source 1..41: mol_type = other RNA
atagattgctccttacgaggagacctggccctctccaggcc

SEQ ID NO: 584 - RNA, 41 nt, synthetic construct
  source 1..41: mol_type = other RNA
atagattgctccttacgaggagacagacttgagaacaagtg

SEQ ID NO: 585 - RNA, 41 nt, synthetic construct
  source 1..41: mol_type = other RNA
atagattgctccttacgaggagacggagtaaaggcacagaa

SEQ ID NO: 586 - RNA, 41 nt, synthetic construct
  source 1..41: mol_type = other RNA
atagattgctccttacgaggagaccccctccccagagggca

SEQ ID NO: 587 - RNA, 41 nt, synthetic construct
  source 1..41: mol_type = other RNA
atagattgctccttacgaggagacgagccacttccagcccc

SEQ ID NO: 588 - RNA, 41 nt, synthetic construct
  source 1..41: mol_type = other RNA
atagattgctccttacgaggagaccttcctagctgactggc

SEQ ID NO: 589 - RNA, 41 nt, synthetic construct
  source 1..41: mol_type = other RNA
atagattgctccttacgaggagacctccagccctaagcctg

SEQ ID NO: 590 - RNA, 41 nt, synthetic construct
  source 1..41: mol_type = other RNA
atagattgctccttacgaggagactgacctgttttatatca

SEQ ID NO: 591 - RNA, 41 nt, synthetic construct
  source 1..41: mol_type = other RNA
atagattgctccttacgaggagaccagccccaccccctgtg

SEQ ID NO: 592 - RNA, 41 nt, synthetic construct
  source 1..41: mol_type = other RNA
atagattgctccttacgaggagacaggcccctccctccacc

SEQ ID NO: 593 - RNA, 41 nt, synthetic construct
  source 1..41: mol_type = other RNA
atagattgctccttacgaggagaccttagctctagcaagtg

SEQ ID NO: 594 - RNA, 41 nt, synthetic construct
  source 1..41: mol_type = other RNA
atagattgctccttacgaggagacgggcaagtgacacccct

SEQ ID NO: 595 - RNA, 41 nt, synthetic construct
  source 1..41: mol_type = other RNA
atagattgctccttacgaggagacccctgtctggggtagga

SEQ ID NO: 596 - RNA, 41 nt, synthetic construct
  source 1..41: mol_type = other RNA
atagattgctccttacgaggagacggtgatttctggccctc

SEQ ID NO: 597 - RNA, 41 nt, synthetic construct
  source 1..41: mol_type = other RNA
atagattgctccttacgaggagacgggtgatttctggccct

SEQ ID NO: 598 - RNA, 41 nt, synthetic construct
  source 1..41: mol_type = other RNA
atagattgctccttacgaggagacacactggaatttcaggc

SEQ ID NO: 599 - RNA, 41 nt, synthetic construct
  source 1..41: mol_type = other RNA
atagattgctccttacgaggagacgacataggccaggggcc

SEQ ID NO: 600 - RNA, 41 nt, synthetic construct
  source 1..41: mol_type = other RNA
atagattgctccttacgaggagacatatcatctccagggca

SEQ ID NO: 601 - RNA, 41 nt, synthetic construct
  source 1..41: mol_type = other RNA
atagattgctccttacgaggagacatcctcctcccctcctc

SEQ ID NO: 602 - RNA, 41 nt, synthetic construct
  source 1..41: mol_type = other RNA
atagattgctccttacgaggagacgggagggcgaggccgaa

SEQ ID NO: 603 - RNA, 41 nt, synthetic construct
  source 1..41: mol_type = other RNA
atagattgctccttacgaggagacaatcagataggatcgtc

SEQ ID NO: 604 - RNA, 41 nt, synthetic construct
  source 1..41: mol_type = other RNA
atagattgctccttacgaggagacatcagataggatcgtcc

SEQ ID NO: 605 - RNA, 41 nt, synthetic construct
  source 1..41: mol_type = other RNA
atagattgctccttacgaggagacggatttgggagtttttt

SEQ ID NO: 606 - RNA, 41 nt, synthetic construct
  source 1..41: mol_type = other RNA
atagattgctccttacgaggagactcttccctctgcgcgta

SEQ ID NO: 607 - RNA, 41 nt, synthetic construct
  source 1..41: mol_type = other RNA
atagattgctccttacgaggagacggagttttttcttccct

SEQ ID NO: 608 - RNA, 41 nt, synthetic construct
  source 1..41: mol_type = other RNA
atagattgctccttacgaggagaccaccgctgcgccaaggt

SEQ ID NO: 609 - RNA, 41 nt, synthetic construct
  source 1..41: mol_type = other RNA
atagattgctccttacgaggagacagggtctgagcctggag

SEQ ID NO: 610 - RNA, 41 nt, synthetic construct
  source 1..41: mol_type = other RNA
atagattgctccttacgaggagaccgcgcgccccttcacgc

SEQ ID NO: 611 - RNA, 41 nt, synthetic construct
  source 1..41: mol_type = other RNA
atagattgctccttacgaggagaccttccctctgcgcgtaa

SEQ ID NO: 612 - RNA, 41 nt, synthetic construct
  source 1..41: mol_type = other RNA
atagattgctccttacgaggagacgagtctggcatcccacg

SEQ ID NO: 613 - RNA, 41 nt, synthetic construct
  source 1..41: mol_type = other RNA
atagattgctccttacgaggagacagttcagggtctgagcc

SEQ ID NO: 614 - RNA, 41 nt, synthetic construct
  source 1..41: mol_type = other RNA
atagattgctccttacgaggagacatgtttaatcagatagg

SEQ ID NO: 615 - RNA, 41 nt, synthetic construct
  source 1..41: mol_type = other RNA
atagattgctccttacgaggagacagctcctgcacagtcct

SEQ ID NO: 616 - RNA, 41 nt, synthetic construct
  source 1..41: mol_type = other RNA
atagattgctccttacgaggagacttccctctgcgcgtaat

SEQ ID NO: 617 - RNA, 41 nt, synthetic construct
  source 1..41: mol_type = other RNA
atagattgctccttacgaggagactttcttccctctgcgcg

SEQ ID NO: 618 - RNA, 41 nt, synthetic construct
  source 1..41: mol_type = other RNA
atagattgctccttacgaggagacaaggagcagctagttgg

SEQ ID NO: 619 - RNA, 41 nt, synthetic construct
  source 1..41: mol_type = other RNA
atagattgctccttacgaggagaccagcagcggctcccagc

SEQ ID NO: 620 - RNA, 41 nt, synthetic construct
  source 1..41: mol_type = other RNA
atagattgctccttacgaggagacttcttccctctgcgcgt

SEQ ID NO: 621 - RNA, 41 nt, synthetic construct
  source 1..41: mol_type = other RNA
atagattgctccttacgaggagacgggagttttttcttccc

SEQ ID NO: 622 - RNA, 41 nt, synthetic construct
  source 1..41: mol_type = other RNA
atagattgctccttacgaggagacagaagtctcactggtca

SEQ ID NO: 623 - RNA, 41 nt, synthetic construct
  source 1..41: mol_type = other RNA
atagattgctccttacgaggagacggtgggcagcgaggagt

SEQ ID NO: 624 - RNA, 41 nt, synthetic construct
  source 1..41: mol_type = other RNA
atagattgctccttacgaggagaccgcagcgacgtcgaggc

SEQ ID NO: 625 - RNA, 41 nt, synthetic construct
  source 1..41: mol_type = other RNA
atagattgctccttacgaggagaccgaggaggacggcctgg

SEQ ID NO: 626 - RNA, 41 nt, synthetic construct
  source 1..41: mol_type = other RNA
atagattgctccttacgaggagacaggccagtggaaagaat

SEQ ID NO: 627 - RNA, 41 nt, synthetic construct
  source 1..41: mol_type = other RNA
atagattgctccttacgaggagacggggagggcgaggccga

SEQ ID NO: 628 - RNA, 41 nt, synthetic construct
  source 1..41: mol_type = other RNA
atagattgctccttacgaggagacattcagaagtctcactg

SEQ ID NO: 629 - RNA, 41 nt, synthetic construct
  source 1..41: mol_type = other RNA
atagattgctccttacgaggagaccagcccagttaggattt

SEQ ID NO: 630 - RNA, 41 nt, synthetic construct
  source 1..41: mol_type = other RNA
atagattgctccttacgaggagaccgttaatgtttaatcag

SEQ ID NO: 631 - RNA, 41 nt, synthetic construct
  source 1..41: mol_type = other RNA
atagattgctccttacgaggagacgaaggctgccaggttaa

SEQ ID NO: 632 - RNA, 41 nt, synthetic construct
  source 1..41: mol_type = other RNA
atagattgctccttacgaggagaccaggcgggcgccgccgt

SEQ ID NO: 633 - RNA, 41 nt, synthetic construct
  source 1..41: mol_type = other RNA
atagattgctccttacgaggagacgtaaggtcagtgtgcag

SEQ ID NO: 634 - RNA, 41 nt, synthetic construct
  source 1..41: mol_type = other RNA
atagattgctccttacgaggagaccgttccgaggaggacgg

SEQ ID NO: 635 - RNA, 41 nt, synthetic construct
  source 1..41: mol_type = other RNA
atagattgctccttacgaggagaccctctgcgcgtaatctg

SEQ ID NO: 636 - RNA, 41 nt, synthetic construct
  source 1..41: mol_type = other RNA
atagattgctccttacgaggagacagaaggctgccaggtta

SEQ ID NO: 637 - RNA, 41 nt, synthetic construct
  source 1..41: mol_type = other RNA
atagattgctccttacgaggagacacgcgccctgctcctga

SEQ ID NO: 638 - RNA, 41 nt, synthetic construct
  source 1..41: mol_type = other RNA
atagattgctccttacgaggagacccgcagcgacgtcgagg

SEQ ID NO: 639 - RNA, 41 nt, synthetic construct
  source 1..41: mol_type = other RNA
atagattgctccttacgaggagacccaactagctgctcctt

SEQ ID NO: 640 - RNA, 41 nt, synthetic construct
  source 1..41: mol_type = other RNA
atagattgctccttacgaggagacagtgtttcctgggtcca

SEQ ID NO: 641 - RNA, 41 nt, synthetic construct
  source 1..41: mol_type = other RNA
atagattgctccttacgaggagactgccgggcccacctttt

SEQ ID NO: 642 - RNA, 41 nt, synthetic construct
  source 1..41: mol_type = other RNA
atagattgctccttacgaggagacacggaacccccggactg

SEQ ID NO: 643 - RNA, 41 nt, synthetic construct
  source 1..41: mol_type = other RNA
atagattgctccttacgaggagaccgcgcagagggaagaaa

SEQ ID NO: 644 - RNA, 41 nt, synthetic construct
  source 1..41: mol_type = other RNA
atagattgctccttacgaggagactttccactggccttaac

SEQ ID NO: 645 - RNA, 41 nt, synthetic construct
  source 1..41: mol_type = other RNA
atagattgctccttacgaggagactcagtgtttcctgggtc

SEQ ID NO: 646 - RNA, 41 nt, synthetic construct
  source 1..41: mol_type = other RNA
atagattgctccttacgaggagacgcgcagcggtggaaggt

SEQ ID NO: 647 - RNA, 41 nt, synthetic construct
  source 1..41: mol_type = other RNA
atagattgctccttacgaggagactagggtgtgggtgcttg

SEQ ID NO: 648 - RNA, 41 nt, synthetic construct
  source 1..41: mol_type = other RNA
atagattgctccttacgaggagacaggagcagggcgcgtga

SEQ ID NO: 649 - RNA, 41 nt, synthetic construct
  source 1..41: mol_type = other RNA
atagattgctccttacgaggagaccggcctcgccctcccca

SEQ ID NO: 650 - RNA, 41 nt, synthetic construct
  source 1..41: mol_type = other RNA
atagattgctccttacgaggagaccggtggggaggactgtg

SEQ ID NO: 651 - RNA, 41 nt, synthetic construct
  source 1..41: mol_type = other RNA
atagattgctccttacgaggagaccctgggtccaccttgtc

SEQ ID NO: 652 - RNA, 41 nt, synthetic construct
  source 1..41: mol_type = other RNA
atagattgctccttacgaggagacggccaggccgtcctcct

SEQ ID NO: 653 - RNA, 41 nt, synthetic construct
  source 1..41: mol_type = other RNA
atagattgctccttacgaggagaccagtgtttcctgggtcc

SEQ ID NO: 654 - RNA, 41 nt, synthetic construct
  source 1..41: mol_type = other RNA
atagattgctccttacgaggagactgaatcaatcctactgt

SEQ ID NO: 655 - RNA, 41 nt, synthetic construct
  source 1..41: mol_type = other RNA
atagattgctccttacgaggagacggcctcgccctccccaa

SEQ ID NO: 656 - RNA, 41 nt, synthetic construct
  source 1..41: mol_type = other RNA
atagattgctccttacgaggagacaacattaacggaacccc

SEQ ID NO: 657 - RNA, 41 nt, synthetic construct
  source 1..41: mol_type = other RNA
atagattgctccttacgaggagacacgcctggggcgcgcag

SEQ ID NO: 658 - RNA, 41 nt, synthetic construct
  source 1..41: mol_type = other RNA
atagattgctccttacgaggagactaaacttagcctggacc

SEQ ID NO: 659 - RNA, 41 nt, synthetic construct
  source 1..41: mol_type = other RNA
atagattgctccttacgaggagaccgtgctcgggtgcttcg

SEQ ID NO: 660 - RNA, 41 nt, synthetic construct
  source 1..41: mol_type = other RNA
atagattgctccttacgaggagacctgtcctggcgaggaga

SEQ ID NO: 661 - RNA, 41 nt, synthetic construct
  source 1..41: mol_type = other RNA
atagattgctccttacgaggagacatgcaccctgcacactg

SEQ ID NO: 662 - RNA, 41 nt, synthetic construct
  source 1..41: mol_type = other RNA
atagattgctccttacgaggagaccactggccttaacctgg

SEQ ID NO: 663 - RNA, 41 nt, synthetic construct
  source 1..41: mol_type = other RNA
atagattgctccttacgaggagacctgggtccaccttgtct

SEQ ID NO: 664 - RNA, 41 nt, synthetic construct
  source 1..41: mol_type = other RNA
atagattgctccttacgaggagactctcctgctgaccagtg

SEQ ID NO: 665 - RNA, 41 nt, synthetic construct
  source 1..41: mol_type = other RNA
atagattgctccttacgaggagacgcctggaccccctccgg

SEQ ID NO: 666 - RNA, 41 nt, synthetic construct
  source 1..41: mol_type = other RNA
atagattgctccttacgaggagacccactggccttaacctg

SEQ ID NO: 667 - RNA, 41 nt, synthetic construct
  source 1..41: mol_type = other RNA
atagattgctccttacgaggagactgcaccctgcacactga

SEQ ID NO: 668 - RNA, 41 nt, synthetic construct
  source 1..41: mol_type = other RNA
atagattgctccttacgaggagacacctggcagccttctaa

SEQ ID NO: 669 - RNA, 41 nt, synthetic construct
  source 1..41: mol_type = other RNA
atagattgctccttacgaggagacagccttgcggtggggag

SEQ ID NO: 670 - RNA, 41 nt, synthetic construct
  source 1..41: mol_type = other RNA
atagattgctccttacgaggagacttgacttgtaaatctct

SEQ ID NO: 671 - RNA, 41 nt, synthetic construct
  source 1..41: mol_type = other RNA
atagattgctccttacgaggagacggacatggtcttaaaga

SEQ ID NO: 672 - RNA, 41 nt, synthetic construct
  source 1..41: mol_type = other RNA
atagattgctccttacgaggagacttattgttcctctagtt

SEQ ID NO: 673 - RNA, 41 nt, synthetic construct
  source 1..41: mol_type = other RNA
atagattgctccttacgaggagacatctaactcaatgtgga

SEQ ID NO: 674 - RNA, 41 nt, synthetic construct
  source 1..41: mol_type = other RNA
atagattgctccttacgaggagacttatgatctatcgctgc

SEQ ID NO: 675 - RNA, 41 nt, synthetic construct
  source 1..41: mol_type = other RNA
atagattgctccttacgaggagacacccaacaaaaaagttt

SEQ ID NO: 676 - RNA, 41 nt, synthetic construct
  source 1..41: mol_type = other RNA
atagattgctccttacgaggagaccatttagcattgatcta

SEQ ID NO: 677 - RNA, 41 nt, synthetic construct
  source 1..41: mol_type = other RNA
atagattgctccttacgaggagacttgttcctctagttatt

SEQ ID NO: 678 - RNA, 41 nt, synthetic construct
  source 1..41: mol_type = other RNA
atagattgctccttacgaggagactggaatggatcactgtt

SEQ ID NO: 679 - RNA, 41 nt, synthetic construct
  source 1..41: mol_type = other RNA
atagattgctccttacgaggagacgtgcaagttaacacggc

SEQ ID NO: 680 - RNA, 41 nt, synthetic construct
  source 1..41: mol_type = other RNA
atagattgctccttacgaggagaccagaagaaaacagttcc

SEQ ID NO: 681 - RNA, 41 nt, synthetic construct
  source 1..41: mol_type = other RNA
atagattgctccttacgaggagactttggaatggatcactg

SEQ ID NO: 682 - RNA, 41 nt, synthetic construct
  source 1..41: mol_type = other RNA
atagattgctccttacgaggagaccctattaagttagttgc

SEQ ID NO: 683 - RNA, 41 nt, synthetic construct
  source 1..41: mol_type = other RNA
atagattgctccttacgaggagacagaagagcaactaacta

SEQ ID NO: 684 - RNA, 41 nt, synthetic construct
  source 1..41: mol_type = other RNA
atagattgctccttacgaggagacagcattgatctaactca

SEQ ID NO: 685 - RNA, 41 nt, synthetic construct
  source 1..41: mol_type = other RNA
atagattgctccttacgaggagactttcctccagaattgat

SEQ ID NO: 686 - RNA, 41 nt, synthetic construct
  source 1..41: mol_type = other RNA
atagattgctccttacgaggagacctatgttagacgatgta

SEQ ID NO: 687 - RNA, 41 nt, synthetic construct
  source 1..41: mol_type = other RNA
atagattgctccttacgaggagacccctcaactttaataat

SEQ ID NO: 688 - RNA, 41 nt, synthetic construct
  source 1..41: mol_type = other RNA
atagattgctccttacgaggagacacaattaagctccttct

SEQ ID NO: 689 - RNA, 41 nt, synthetic construct
  source 1..41: mol_type = other RNA
atagattgctccttacgaggagacagctccttctttttatt

SEQ ID NO: 690 - RNA, 41 nt, synthetic construct
  source 1..41: mol_type = other RNA
atagattgctccttacgaggagacaaaaacaggtagtcacc

SEQ ID NO: 691 - RNA, 41 nt, synthetic construct
  source 1..41: mol_type = other RNA
atagattgctccttacgaggagacacctaccaaccttacct

SEQ ID NO: 692 - RNA, 41 nt, synthetic construct
  source 1..41: mol_type = other RNA
atagattgctccttacgaggagacccttttctgggcaaata

SEQ ID NO: 693 - RNA, 41 nt, synthetic construct
  source 1..41: mol_type = other RNA
atagattgctccttacgaggagacatcaagacaattcatca

SEQ ID NO: 694 - RNA, 41 nt, synthetic construct
  source 1..41: mol_type = other RNA
atagattgctccttacgaggagacaactcaactcaaaactt

SEQ ID NO: 695 - RNA, 41 nt, synthetic construct
  source 1..41: mol_type = other RNA
atagattgctccttacgaggagaccttttttcccctcaact

SEQ ID NO: 696 - RNA, 41 nt, synthetic construct
  source 1..41: mol_type = other RNA
atagattgctccttacgaggagactacttcaacaaaaagtg

SEQ ID NO: 697 - RNA, 41 nt, synthetic construct
  source 1..41: mol_type = other RNA
atagattgctccttacgaggagacctctagttatttcctcc

SEQ ID NO: 698 - RNA, 41 nt, synthetic construct
  source 1..41: mol_type = other RNA
atagattgctccttacgaggagacttggaatggatcactgt

SEQ ID NO: 699 - RNA, 41 nt, synthetic construct
  source 1..41: mol_type = other RNA
atagattgctccttacgaggagaccacgttgcttgaaattg

SEQ ID NO: 700 - RNA, 41 nt, synthetic construct
  source 1..41: mol_type = other RNA
atagattgctccttacgaggagactcccctcaactttaata

SEQ ID NO: 701 - RNA, 41 nt, synthetic construct
  source 1..41: mol_type = other RNA
atagattgctccttacgaggagacactatgttcacctacca

SEQ ID NO: 702 - RNA, 41 nt, synthetic construct
  source 1..41: mol_type = other RNA
atagattgctccttacgaggagacagttagttgctcatttc

SEQ ID NO: 703 - RNA, 41 nt, synthetic construct
  source 1..41: mol_type = other RNA
atagattgctccttacgaggagacgctatgttagacgatgt

SEQ ID NO: 704 - RNA, 41 nt, synthetic construct
  source 1..41: mol_type = other RNA
atagattgctccttacgaggagaccctccagaattgatcaa

SEQ ID NO: 705 - RNA, 41 nt, synthetic construct
  source 1..41: mol_type = other RNA
atagattgctccttacgaggagacatgatctatcgctgcaa

SEQ ID NO: 706 - RNA, 41 nt, synthetic construct
  source 1..41: mol_type = other RNA
atagattgctccttacgaggagactctgggcaaatattggt

SEQ ID NO: 707 - RNA, 41 nt, synthetic construct
  source 1..41: mol_type = other RNA
atagattgctccttacgaggagaccaaaagaactaaagtac

SEQ ID NO: 708 - RNA, 41 nt, synthetic construct
  source 1..41: mol_type = other RNA
atagattgctccttacgaggagacagaagtctaggtctgct

SEQ ID NO: 709 - RNA, 41 nt, synthetic construct
  source 1..41: mol_type = other RNA
atagattgctccttacgaggagacgaagagcaactaactaa

SEQ ID NO: 710 - RNA, 41 nt, synthetic construct
  source 1..41: mol_type = other RNA
atagattgctccttacgaggagactgacttgtaaatctctt

SEQ ID NO: 711 - RNA, 41 nt, synthetic construct
  source 1..41: mol_type = other RNA
atagattgctccttacgaggagacaaagcctcctagaagaa

SEQ ID NO: 712 - RNA, 41 nt, synthetic construct
  source 1..41: mol_type = other RNA
atagattgctccttacgaggagacgacttgtaaatctctta

SEQ ID NO: 713 - RNA, 41 nt, synthetic construct
  source 1..41: mol_type = other RNA
atagattgctccttacgaggagacgcattgatctaactcaa

SEQ ID NO: 714 - RNA, 41 nt, synthetic construct
  source 1..41: mol_type = other RNA
atagattgctccttacgaggagactagccaatggcctcctt

SEQ ID NO: 715 - RNA, 41 nt, synthetic construct
  source 1..41: mol_type = other RNA
atagattgctccttacgaggagacgatttcatttagcattg

SEQ ID NO: 716 - RNA, 41 nt, synthetic construct
  source 1..41: mol_type = other RNA
atagattgctccttacgaggagaccattcgtgcaagttaac

SEQ ID NO: 717 - RNA, 41 nt, synthetic construct
  source 1..41: mol_type = other RNA
atagattgctccttacgaggagacaaaacaggtagtcacca

SEQ ID NO: 718 - RNA, 41 nt, synthetic construct
  source 1..41: mol_type = other RNA
atagattgctccttacgaggagacgagaaatgcatacttaa

SEQ ID NO: 719 - RNA, 41 nt, synthetic construct
  source 1..41: mol_type = other RNA
atagattgctccttacgaggagacgatcagtctttttatga

SEQ ID NO: 720 - RNA, 41 nt, synthetic construct
  source 1..41: mol_type = other RNA
atagattgctccttacgaggagactgggcaaatattggtat

SEQ ID NO: 721 - RNA, 41 nt, synthetic construct
  source 1..41: mol_type = other RNA
atagattgctccttacgaggagacttcctctagttatttcc

SEQ ID NO: 722 - RNA, 41 nt, synthetic construct
  source 1..41: mol_type = other RNA
atagattgctccttacgaggagaccccctcaactttaataa

SEQ ID NO: 723 - RNA, 41 nt, synthetic construct
  source 1..41: mol_type = other RNA
atagattgctccttacgaggagacccaaaagaactaaagta

SEQ ID NO: 724 - RNA, 41 nt, synthetic construct
  source 1..41: mol_type = other RNA
atagattgctccttacgaggagacggaatggatcactgttt

SEQ ID NO: 725 - RNA, 41 nt, synthetic construct
  source 1..41: mol_type = other RNA
atagattgctccttacgaggagactgatctatcgctgcaaa

SEQ ID NO: 726 - RNA, 41 nt, synthetic construct
  source 1..41: mol_type = other RNA
atagattgctccttacgaggagactttcccctcaactttaa

SEQ ID NO: 727 - RNA, 41 nt, synthetic construct
  source 1..41: mol_type = other RNA
atagattgctccttacgaggagacagttgggacatggtctt

SEQ ID NO: 728 - RNA, 41 nt, synthetic construct
  source 1..41: mol_type = other RNA
atagattgctccttacgaggagactccataagacgaagggc

SEQ ID NO: 729 - RNA, 41 nt, synthetic construct
  source 1..41: mol_type = other RNA
atagattgctccttacgaggagacattctctatctccagag

SEQ ID NO: 730 - RNA, 41 nt, synthetic construct
  source 1..41: mol_type = other RNA
atagattgctccttacgaggagacgttgctcatttctttga

SEQ ID NO: 731 - RNA, 41 nt, synthetic construct
  source 1..41: mol_type = other RNA
atagattgctccttacgaggagacattacttttttcccctc

SEQ ID NO: 732 - RNA, 41 nt, synthetic construct
  source 1..41: mol_type = other RNA
atagattgctccttacgaggagacctgggcaaatattggta

SEQ ID NO: 733 - RNA, 41 nt, synthetic construct
  source 1..41: mol_type = other RNA
atagattgctccttacgaggagacttcccctcaactttaat

SEQ ID NO: 734 - RNA, 41 nt, synthetic construct
  source 1..41: mol_type = other RNA
atagattgctccttacgaggagacgaatggatcactgtttc

SEQ ID NO: 735 - RNA, 41 nt, synthetic construct
  source 1..41: mol_type = other RNA
atagattgctccttacgaggagactatgatctatcgctgca

SEQ ID NO: 736 - RNA, 41 nt, synthetic construct
  source 1..41: mol_type = other RNA
atagattgctccttacgaggagactaaaaacaggtagtcac

SEQ ID NO: 737 - RNA, 41 nt, synthetic construct
  source 1..41: mol_type = other RNA
atagattgctccttacgaggagacattgttcctctagttat

SEQ ID NO: 738 - RNA, 41 nt, synthetic construct
  source 1..41: mol_type = other RNA
atagattgctccttacgaggagacctttgatttcatttagc

SEQ ID NO: 739 - RNA, 41 nt, synthetic construct
  source 1..41: mol_type = other RNA
atagattgctccttacgaggagaccccaacaaaaaagttta

SEQ ID NO: 740 - RNA, 41 nt, synthetic construct
  source 1..41: mol_type = other RNA
atagattgctccttacgaggagacagagccgtaacaccacc

SEQ ID NO: 741 - RNA, 41 nt, synthetic construct
  source 1..41: mol_type = other RNA
atagattgctccttacgaggagacctccagaattgatcaag

SEQ ID NO: 742 - RNA, 41 nt, synthetic construct
  source 1..41: mol_type = other RNA
atagattgctccttacgaggagacagccaatggcctccttc

SEQ ID NO: 743 - RNA, 41 nt, synthetic construct
  source 1..41: mol_type = other RNA
atagattgctccttacgaggagactattgttcctctagtta

SEQ ID NO: 744 - RNA, 41 nt, synthetic construct
  source 1..41: mol_type = other RNA
atagattgctccttacgaggagacgccaatggcctccttca

SEQ ID NO: 745 - RNA, 41 nt, synthetic construct
  source 1..41: mol_type = other RNA
atagattgctccttacgaggagacgtccataagacgaaggg

SEQ ID NO: 746 - RNA, 41 nt, synthetic construct
  source 1..41: mol_type = other RNA
atagattgctccttacgaggagacacacggcttaatgatta

SEQ ID NO: 747 - RNA, 41 nt, synthetic construct
  source 1..41: mol_type = other RNA
atagattgctccttacgaggagacaagactttgtccataag

SEQ ID NO: 748 - RNA, 41 nt, synthetic construct
  source 1..41: mol_type = other RNA
atagattgctccttacgaggagacgcttttaaaaacaggta

SEQ ID NO: 749 - RNA, 41 nt, synthetic construct
  source 1..41: mol_type = other RNA
atagattgctccttacgaggagacctcatttctttgatttc

SEQ ID NO: 750 - RNA, 41 nt, synthetic construct
  source 1..41: mol_type = other RNA
atagattgctccttacgaggagacgattctctatctccaga

SEQ ID NO: 751 - RNA, 41 nt, synthetic construct
  source 1..41: mol_type = other RNA
atagattgctccttacgaggagactctatctccagagccaa

SEQ ID NO: 752 - RNA, 41 nt, synthetic construct
  source 1..41: mol_type = other RNA
atagattgctccttacgaggagacagagagaaagtgttttt

SEQ ID NO: 753 - RNA, 41 nt, synthetic construct
  source 1..41: mol_type = other RNA
atagattgctccttacgaggagacatcattaagccgtgtta

SEQ ID NO: 754 - RNA, 41 nt, synthetic construct
  source 1..41: mol_type = other RNA
atagattgctccttacgaggagacgttagttgctcttctaa

SEQ ID NO: 755 - RNA, 41 nt, synthetic construct
  source 1..41: mol_type = other RNA
atagattgctccttacgaggagactggctctggagatagag

SEQ ID NO: 756 - RNA, 41 nt, synthetic construct
  source 1..41: mol_type = other RNA
atagattgctccttacgaggagacacatcgtctaacatagc

SEQ ID NO: 757 - RNA, 41 nt, synthetic construct
  source 1..41: mol_type = other RNA
atagattgctccttacgaggagacttattaaagttgagggg

SEQ ID NO: 758 - RNA, 41 nt, synthetic construct
  source 1..41: mol_type = other RNA
atagattgctccttacgaggagaccccagaaaaggtaaggt

SEQ ID NO: 759 - RNA, 41 nt, synthetic construct
  source 1..41: mol_type = other RNA
atagattgctccttacgaggagacttcttctttgatttcac

SEQ ID NO: 760 - RNA, 41 nt, synthetic construct
  source 1..41: mol_type = other RNA
atagattgctccttacgaggagacagtatgcatttctcaaa

SEQ ID NO: 761 - RNA, 41 nt, synthetic construct
  source 1..41: mol_type = other RNA
atagattgctccttacgaggagaccaaaaaacactttctct

SEQ ID NO: 762 - RNA, 41 nt, synthetic construct
  source 1..41: mol_type = other RNA
atagattgctccttacgaggagacgaaacagtgatccattc

SEQ ID NO: 763 - RNA, 41 nt, synthetic construct
  source 1..41: mol_type = other RNA
atagattgctccttacgaggagacatatgtagttcttctca

SEQ ID NO: 764 - RNA, 41 nt, synthetic construct
  source 1..41: mol_type = other RNA
atagattgctccttacgaggagaccttctggaagcagacct

SEQ ID NO: 765 - RNA, 41 nt, synthetic construct
  source 1..41: mol_type = other RNA
atagattgctccttacgaggagactctctgaagcctttctc

SEQ ID NO: 766 - RNA, 41 nt, synthetic construct
  source 1..41: mol_type = other RNA
atagattgctccttacgaggagactcaaactgtactttagt

SEQ ID NO: 767 - RNA, 41 nt, synthetic construct
  source 1..41: mol_type = other RNA
atagattgctccttacgaggagacaagaccatgtcccaact

SEQ ID NO: 768 - RNA, 41 nt, synthetic construct
  source 1..41: mol_type = other RNA
atagattgctccttacgaggagaccacattgagttagatca

SEQ ID NO: 769 - RNA, 41 nt, synthetic construct
  source 1..41: mol_type = other RNA
atagattgctccttacgaggagacaagttttgagttgagtt

SEQ ID NO: 770 - RNA, 41 nt, synthetic construct
  source 1..41: mol_type = other RNA
atagattgctccttacgaggagaccctcttcatttttgact

SEQ ID NO: 771 - RNA, 41 nt, synthetic construct
  source 1..41: mol_type = other RNA
atagattgctccttacgaggagacgcccagaaaaggtaagg

SEQ ID NO: 772 - RNA, 41 nt, synthetic construct
  source 1..41: mol_type = other RNA
atagattgctccttacgaggagacagttagatcaatgctaa

SEQ ID NO: 773 - RNA, 41 nt, synthetic construct
  source 1..41: mol_type = other RNA
atagattgctccttacgaggagacttccacattgagttaga

SEQ ID NO: 774 - RNA, 41 nt, synthetic construct
  source 1..41: mol_type = other RNA
atagattgctccttacgaggagacttctcagttccttttct

SEQ ID NO: 775 - RNA, 41 nt, synthetic construct
  source 1..41: mol_type = other RNA
atagattgctccttacgaggagactggacaaagtctttaag

SEQ ID NO: 776 - RNA, 41 nt, synthetic construct
  source 1..41: mol_type = other RNA
atagattgctccttacgaggagacgcccttcgtcttatgga

SEQ ID NO: 777 - RNA, 41 nt, synthetic construct
  source 1..41: mol_type = other RNA
atagattgctccttacgaggagactggaagcagacctagac

SEQ ID NO: 778 - RNA, 41 nt, synthetic construct
  source 1..41: mol_type = other RNA
atagattgctccttacgaggagacgctgtattataaactac

SEQ ID NO: 779 - RNA, 41 nt, synthetic construct
  source 1..41: mol_type = other RNA
atagattgctccttacgaggagaccactttttgttgaagta

SEQ ID NO: 780 - RNA, 41 nt, synthetic construct
  source 1..41: mol_type = other RNA
atagattgctccttacgaggagacgttgctcttctaaatat

SEQ ID NO: 781 - RNA, 41 nt, synthetic construct
  source 1..41: mol_type = other RNA
atagattgctccttacgaggagaccaagcaacgtggaactg

SEQ ID NO: 782 - RNA, 41 nt, synthetic construct
  source 1..41: mol_type = other RNA
atagattgctccttacgaggagacactttttgttgaagtag

SEQ ID NO: 783 - RNA, 41 nt, synthetic construct
  source 1..41: mol_type = other RNA
atagattgctccttacgaggagacgtaggtgaacatagtta

SEQ ID NO: 784 - RNA, 41 nt, synthetic construct
  source 1..41: mol_type = other RNA
atagattgctccttacgaggagacaggggaaaaaagtaatg

SEQ ID NO: 785 - RNA, 41 nt, synthetic construct
  source 1..41: mol_type = other RNA
atagattgctccttacgaggagaccagcgatagatcataaa

SEQ ID NO: 786 - RNA, 41 nt, synthetic construct
  source 1..41: mol_type = other RNA
atagattgctccttacgaggagactacatcgtctaacatag

SEQ ID NO: 787 - RNA, 41 nt, synthetic construct
  source 1..41: mol_type = other RNA
atagattgctccttacgaggagacattattaaagttgaggg

SEQ ID NO: 788 - RNA, 41 nt, synthetic construct
  source 1..41: mol_type = other RNA
atagattgctccttacgaggagacttcttctaggaggcttt

SEQ ID NO: 789 - RNA, 41 nt, synthetic construct
  source 1..41: mol_type = other RNA
atagattgctccttacgaggagacggcccttcgtcttatgg

SEQ ID NO: 790 - RNA, 41 nt, synthetic construct
  source 1..41: mol_type = other RNA
atagattgctccttacgaggagacagccgtgttaacttgca

SEQ ID NO: 791 - RNA, 41 nt, synthetic construct
  source 1..41: mol_type = other RNA
atagattgctccttacgaggagactccactccctcaggtgg

SEQ ID NO: 792 - RNA, 41 nt, synthetic construct
  source 1..41: mol_type = other RNA
atagattgctccttacgaggagacagttgagttcaagtgac

SEQ ID NO: 793 - RNA, 41 nt, synthetic construct
  source 1..41: mol_type = other RNA
atagattgctccttacgaggagacctcaaactgtactttag

SEQ ID NO: 794 - RNA, 41 nt, synthetic construct
  source 1..41: mol_type = other RNA
atagattgctccttacgaggagacagttagttagttgctct

SEQ ID NO: 795 - RNA, 41 nt, synthetic construct
  source 1..41: mol_type = other RNA
atagattgctccttacgaggagacttttggaaacagtgatc

SEQ ID NO: 796 - RNA, 41 nt, synthetic construct
  source 1..41: mol_type = other RNA
atagattgctccttacgaggagacaagcaacgtggaactgt

SEQ ID NO: 797 - RNA, 41 nt, synthetic construct
  source 1..41: mol_type = other RNA
atagattgctccttacgaggagactcaatttcaagcaacgt

SEQ ID NO: 798 - RNA, 41 nt, synthetic construct
  source 1..41: mol_type = other RNA
atagattgctccttacgaggagacgatttcactggtttgca

SEQ ID NO: 799 - RNA, 41 nt, synthetic construct
  source 1..41: mol_type = other RNA
atagattgctccttacgaggagacgtcttatggacaaagtc

SEQ ID NO: 800 - RNA, 41 nt, synthetic construct
  source 1..41: mol_type = other RNA
atagattgctccttacgaggagaccatcgtctaacatagca

SEQ ID NO: 801 - RNA, 41 nt, synthetic construct
  source 1..41: mol_type = other RNA
atagattgctccttacgaggagacgttcttttggaaacagt

SEQ ID NO: 802 - RNA, 41 nt, synthetic construct
  source 1..41: mol_type = other RNA
atagattgctccttacgaggagactaggaggctttcaagtt

SEQ ID NO: 803 - RNA, 41 nt, synthetic construct
  source 1..41: mol_type = other RNA
atagattgctccttacgaggagacgatcaatgctaaatgaa

SEQ ID NO: 804 - RNA, 41 nt, synthetic construct
  source 1..41: mol_type = other RNA
atagattgctccttacgaggagacgctctggagatagagaa

SEQ ID NO: 805 - RNA, 41 nt, synthetic construct
  source 1..41: mol_type = other RNA
atagattgctccttacgaggagacacttgcacgaatgtaac

SEQ ID NO: 806 - RNA, 41 nt, synthetic construct
  source 1..41: mol_type = other RNA
atagattgctccttacgaggagacagttcttttggaaacag

SEQ ID NO: 807 - RNA, 41 nt, synthetic construct
  source 1..41: mol_type = other RNA
atagattgctccttacgaggagacaatgctatggtgactac

SEQ ID NO: 808 - RNA, 41 nt, synthetic construct
  source 1..41: mol_type = other RNA
atagattgctccttacgaggagactcttgatcaattctgga

SEQ ID NO: 809 - RNA, 41 nt, synthetic construct
  source 1..41: mol_type = other RNA
atagattgctccttacgaggagacattttggctctggagat

SEQ ID NO: 810 - RNA, 41 nt, synthetic construct
  source 1..41: mol_type = other RNA
atagattgctccttacgaggagactcttctggaagcagacc

SEQ ID NO: 811 - RNA, 41 nt, synthetic construct
  source 1..41: mol_type = other RNA
atagattgctccttacgaggagacttacatcgtctaacata

SEQ ID NO: 812 - RNA, 41 nt, synthetic construct
  source 1..41: mol_type = other RNA
atagattgctccttacgaggagacgagttgagttcaagtga

SEQ ID NO: 813 - RNA, 41 nt, synthetic construct
  source 1..41: mol_type = other RNA
atagattgctccttacgaggagacaagttgaggggaaaaaa

SEQ ID NO: 814 - RNA, 41 nt, synthetic construct
  source 1..41: mol_type = other RNA
atagattgctccttacgaggagactcagttccttttcttct

SEQ ID NO: 815 - RNA, 41 nt, synthetic construct
  source 1..41: mol_type = other RNA
atagattgctccttacgaggagaccacgaatgtaaccttct

SEQ ID NO: 816 - RNA, 41 nt, synthetic construct
  source 1..41: mol_type = other RNA
atagattgctccttacgaggagactaagagatttacaagtc

SEQ ID NO: 817 - RNA, 41 nt, synthetic construct
  source 1..41: mol_type = other RNA
atagattgctccttacgaggagacttctggaagcagaccta

SEQ ID NO: 818 - RNA, 41 nt, synthetic construct
  source 1..41: mol_type = other RNA
atagattgctccttacgaggagacagagatttacaagtcaa

SEQ ID NO: 819 - RNA, 41 nt, synthetic construct
  source 1..41: mol_type = other RNA
atagattgctccttacgaggagacttaaagttgaggggaaa

SEQ ID NO: 820 - RNA, 41 nt, synthetic construct
  source 1..41: mol_type = other RNA
atagattgctccttacgaggagactcttctaggaggctttc

SEQ ID NO: 821 - RNA, 41 nt, synthetic construct
  source 1..41: mol_type = other RNA
atagattgctccttacgaggagaccaagttttgagttgagt

SEQ ID NO: 822 - RNA, 41 nt, synthetic construct
  source 1..41: mol_type = other RNA
atagattgctccttacgaggagacggaaacagtgatccatt

SEQ ID NO: 823 - RNA, 41 nt, synthetic construct
  source 1..41: mol_type = other RNA
atagattgctccttacgaggagacctctctgaagcctttct

SEQ ID NO: 824 - RNA, 41 nt, synthetic construct
  source 1..41: mol_type = other RNA
atagattgctccttacgaggagacggctctggagatagaga

SEQ ID NO: 825 - RNA, 41 nt, synthetic construct
  source 1..41: mol_type = other RNA
atagattgctccttacgaggagacatttcactggtttgcag

SEQ ID NO: 826 - RNA, 41 nt, synthetic construct
  source 1..41: mol_type = other RNA
atagattgctccttacgaggagactttcttctaggaggctt

SEQ ID NO: 827 - RNA, 41 nt, synthetic construct
  source 1..41: mol_type = other RNA
atagattgctccttacgaggagacttctaggaggctttcaa

SEQ ID NO: 828 - RNA, 41 nt, synthetic construct
  source 1..41: mol_type = other RNA
atagattgctccttacgaggagacgcagcgatagatcataa

SEQ ID NO: 829 - RNA, 41 nt, synthetic construct
  source 1..41: mol_type = other RNA
atagattgctccttacgaggagaccaatttcaagcaacgtg

SEQ ID NO: 830 - RNA, 41 nt, synthetic construct
  source 1..41: mol_type = other RNA
atagattgctccttacgaggagacacctcttcatttttgac

SEQ ID NO: 831 - RNA, 41 nt, synthetic construct
  source 1..41: mol_type = other RNA
atagattgctccttacgaggagactggaaacagtgatccat

SEQ ID NO: 832 - RNA, 41 nt, synthetic construct
  source 1..41: mol_type = other RNA
atagattgctccttacgaggagactatgtagttcttctcag

SEQ ID NO: 833 - RNA, 41 nt, synthetic construct
  source 1..41: mol_type = other RNA
atagattgctccttacgaggagaccactggtttgcagcgat

SEQ ID NO: 834 - RNA, 41 nt, synthetic construct
  source 1..41: mol_type = other RNA
atagattgctccttacgaggagacatcaattctggaggaaa

SEQ ID NO: 835 - RNA, 41 nt, synthetic construct
  source 1..41: mol_type = other RNA
atagattgctccttacgaggagacatttggcccttcgtctt

SEQ ID NO: 836 - RNA, 41 nt, synthetic construct
  source 1..41: mol_type = other RNA
atagattgctccttacgaggagacgacttgtagtttatatg

SEQ ID NO: 837 - RNA, 41 nt, synthetic construct
  source 1..41: mol_type = other RNA
atagattgctccttacgaggagactgagttgagttcaagtg

SEQ ID NO: 838 - RNA, 41 nt, synthetic construct
  source 1..41: mol_type = other RNA
atagattgctccttacgaggagaccttctaggaggctttca

SEQ ID NO: 839 - RNA, 41 nt, synthetic construct
  source 1..41: mol_type = other RNA
atagattgctccttacgaggagactggaggaaataactaga

SEQ ID NO: 840 - RNA, 41 nt, synthetic construct
  source 1..41: mol_type = other RNA
atagattgctccttacgaggagacagttcaagtgacatatt

SEQ ID NO: 841 - RNA, 41 nt, synthetic construct
  source 1..41: mol_type = other RNA
atagattgctccttacgaggagacactggtttgcagcgata

SEQ ID NO: 842 - RNA, 41 nt, synthetic construct
  source 1..41: mol_type = other RNA
atagattgctccttacgaggagactttgatttcactggttt

SEQ ID NO: 843 - RNA, 41 nt, synthetic construct
  source 1..41: mol_type = other RNA
atagattgctccttacgaggagaccttcttctttgatttca

SEQ ID NO: 844 - RNA, 41 nt, synthetic construct
  source 1..41: mol_type = other RNA
atagattgctccttacgaggagacttctttgatttcactgg

SEQ ID NO: 845 - RNA, 41 nt, synthetic construct
  source 1..41: mol_type = other RNA
atagattgctccttacgaggagaccggctctcaatgctgtg

SEQ ID NO: 846 - RNA, 41 nt, synthetic construct
  source 1..41: mol_type = other RNA
atagattgctccttacgaggagacaagagatttacaagtca

SEQ ID NO: 847 - RNA, 41 nt, synthetic construct
  source 1..41: mol_type = other RNA
atagattgctccttacgaggagacctccactccctcaggtg

SEQ ID NO: 848 - RNA, 41 nt, synthetic construct
  source 1..41: mol_type = other RNA
atagattgctccttacgaggagactcttcttctttgatttc

SEQ ID NO: 849 - RNA, 41 nt, synthetic construct
  source 1..41: mol_type = other RNA
atagattgctccttacgaggagacagaccatgtcccaactg

SEQ ID NO: 850 - RNA, 41 nt, synthetic construct
  source 1..41: mol_type = other RNA
atagattgctccttacgaggagaccttttcttcttctttga

SEQ ID NO: 851 - RNA, 41 nt, synthetic construct
  source 1..41: mol_type = other RNA
atagattgctccttacgaggagacaatttcaagcaacgtgg

SEQ ID NO: 852 - RNA, 41 nt, synthetic construct
  source 1..41: mol_type = other RNA
atagattgctccttacgaggagactcccactgatattagat

SEQ ID NO: 853 - RNA, 41 nt, synthetic construct
  source 1..41: mol_type = other RNA
atagattgctccttacgaggagactggcccatagcctccct

SEQ ID NO: 854 - RNA, 41 nt, synthetic construct
  source 1..41: mol_type = other RNA
atagattgctccttacgaggagaccaggcagctctgccact

SEQ ID NO: 855 - RNA, 41 nt, synthetic construct
  source 1..41: mol_type = other RNA
atagattgctccttacgaggagaccagtagaatggaatggg

SEQ ID NO: 856 - RNA, 41 nt, synthetic construct
  source 1..41: mol_type = other RNA
atagattgctccttacgaggagactattggctccaggatgg

SEQ ID NO: 857 - RNA, 41 nt, synthetic construct
  source 1..41: mol_type = other RNA
atagattgctccttacgaggagaccttcctctcctccccag

SEQ ID NO: 858 - RNA, 41 nt, synthetic construct
  source 1..41: mol_type = other RNA
atagattgctccttacgaggagaccagtcctgggtaggcat

SEQ ID NO: 859 - RNA, 41 nt, synthetic construct
  source 1..41: mol_type = other RNA
atagattgctccttacgaggagaccctggagtagctagctg

SEQ ID NO: 860 - RNA, 41 nt, synthetic construct
  source 1..41: mol_type = other RNA
atagattgctccttacgaggagaccccagcttctagccccc

SEQ ID NO: 861 - RNA, 41 nt, synthetic construct
  source 1..41: mol_type = other RNA
atagattgctccttacgaggagactccctccagctctttgt

SEQ ID NO: 862 - RNA, 41 nt, synthetic construct
  source 1..41: mol_type = other RNA
atagattgctccttacgaggagacccttccttcctctcctc

SEQ ID NO: 863 - RNA, 41 nt, synthetic construct
  source 1..41: mol_type = other RNA
atagattgctccttacgaggagacctcgctaggactcagtt

SEQ ID NO: 864 - RNA, 41 nt, synthetic construct
  source 1..41: mol_type = other RNA
atagattgctccttacgaggagacagaaatccctctgagat

SEQ ID NO: 865 - RNA, 41 nt, synthetic construct
  source 1..41: mol_type = other RNA
atagattgctccttacgaggagacgtttcttcccttccttc

SEQ ID NO: 866 - RNA, 41 nt, synthetic construct
  source 1..41: mol_type = other RNA
atagattgctccttacgaggagacttcagtcctgggtaggc

SEQ ID NO: 867 - RNA, 41 nt, synthetic construct
  source 1..41: mol_type = other RNA
atagattgctccttacgaggagaccccatgcttttcacggc

SEQ ID NO: 868 - RNA, 41 nt, synthetic construct
  source 1..41: mol_type = other RNA
atagattgctccttacgaggagacttcccttccttcctctc

SEQ ID NO: 869 - RNA, 41 nt, synthetic construct
  source 1..41: mol_type = other RNA
atagattgctccttacgaggagaccatgcccccacactgac

SEQ ID NO: 870 - RNA, 41 nt, synthetic construct
  source 1..41: mol_type = other RNA
atagattgctccttacgaggagaccttttcctcgctaggac

SEQ ID NO: 871 - RNA, 41 nt, synthetic construct
  source 1..41: mol_type = other RNA
atagattgctccttacgaggagaccctcgctaggactcagt

SEQ ID NO: 872 - RNA, 41 nt, synthetic construct
  source 1..41: mol_type = other RNA
atagattgctccttacgaggagactatattggctccaggat

SEQ ID NO: 873 - RNA, 41 nt, synthetic construct
  source 1..41: mol_type = other RNA
atagattgctccttacgaggagacgctccaggatgggacag

SEQ ID NO: 874 - RNA, 41 nt, synthetic construct
  source 1..41: mol_type = other RNA
atagattgctccttacgaggagaccacggccacctccgcca

SEQ ID NO: 875 - RNA, 41 nt, synthetic construct
  source 1..41: mol_type = other RNA
atagattgctccttacgaggagactagccccccccacacca

SEQ ID NO: 876 - RNA, 41 nt, synthetic construct
  source 1..41: mol_type = other RNA
atagattgctccttacgaggagactttcagtcctgggtagg

SEQ ID NO: 877 - RNA, 41 nt, synthetic construct
  source 1..41: mol_type = other RNA
atagattgctccttacgaggagacggcccatagcctccctt

SEQ ID NO: 878 - RNA, 41 nt, synthetic construct
  source 1..41: mol_type = other RNA
atagattgctccttacgaggagaccttcccttccttcctct

SEQ ID NO: 879 - RNA, 41 nt, synthetic construct
  source 1..41: mol_type = other RNA
atagattgctccttacgaggagacgacctcaggcctgcttt

SEQ ID NO: 880 - RNA, 41 nt, synthetic construct
  source 1..41: mol_type = other RNA
atagattgctccttacgaggagacccccagcttctagcccc

SEQ ID NO: 881 - RNA, 41 nt, synthetic construct
  source 1..41: mol_type = other RNA
atagattgctccttacgaggagactttcttcccttccttcc

SEQ ID NO: 882 - RNA, 41 nt, synthetic construct
  source 1..41: mol_type = other RNA
atagattgctccttacgaggagactagggataaaactgagc

SEQ ID NO: 883 - RNA, 41 nt, synthetic construct
  source 1..41: mol_type = other RNA
atagattgctccttacgaggagacatattggctccaggatg

SEQ ID NO: 884 - RNA, 41 nt, synthetic construct
  source 1..41: mol_type = other RNA
atagattgctccttacgaggagacacggccacctccgccac

SEQ ID NO: 885 - RNA, 41 nt, synthetic construct
  source 1..41: mol_type = other RNA
atagattgctccttacgaggagacacagcctagagccagtg

SEQ ID NO: 886 - RNA, 41 nt, synthetic construct
  source 1..41: mol_type = other RNA
atagattgctccttacgaggagacacagaagccacctgaaa

SEQ ID NO: 887 - RNA, 41 nt, synthetic construct
  source 1..41: mol_type = other RNA
atagattgctccttacgaggagactcagtcctgggtaggca

SEQ ID NO: 888 - RNA, 41 nt, synthetic construct
  source 1..41: mol_type = other RNA
atagattgctccttacgaggagactcacggccacctccgcc

SEQ ID NO: 889 - RNA, 41 nt, synthetic construct
  source 1..41: mol_type = other RNA
atagattgctccttacgaggagactcctcgctaggactcag

SEQ ID NO: 890 - RNA, 41 nt, synthetic construct
  source 1..41: mol_type = other RNA
atagattgctccttacgaggagacctcccactgatattaga

SEQ ID NO: 891 - RNA, 41 nt, synthetic construct
  source 1..41: mol_type = other RNA
atagattgctccttacgaggagacttttcctcgctaggact

SEQ ID NO: 892 - RNA, 41 nt, synthetic construct
  source 1..41: mol_type = other RNA
atagattgctccttacgaggagactgtgggctagatggctg

SEQ ID NO: 893 - RNA, 41 nt, synthetic construct
  source 1..41: mol_type = other RNA
atagattgctccttacgaggagacgcccatagcctcccttt

SEQ ID NO: 894 - RNA, 41 nt, synthetic construct
  source 1..41: mol_type = other RNA
atagattgctccttacgaggagactaatagctcagagcaag

SEQ ID NO: 895 - RNA, 41 nt, synthetic construct
  source 1..41: mol_type = other RNA
atagattgctccttacgaggagacagtcctgggtaggcatg

SEQ ID NO: 896 - RNA, 41 nt, synthetic construct
  source 1..41: mol_type = other RNA
atagattgctccttacgaggagaccagcctagagccagtga

SEQ ID NO: 897 - RNA, 41 nt, synthetic construct
  source 1..41: mol_type = other RNA
atagattgctccttacgaggagacctctcctccccaggggc

SEQ ID NO: 898 - RNA, 41 nt, synthetic construct
  source 1..41: mol_type = other RNA
atagattgctccttacgaggagacgatagagaactacagta

SEQ ID NO: 899 - RNA, 41 nt, synthetic construct
  source 1..41: mol_type = other RNA
atagattgctccttacgaggagacgtggcggaggtggccgt

SEQ ID NO: 900 - RNA, 41 nt, synthetic construct
  source 1..41: mol_type = other RNA
atagattgctccttacgaggagacggtcatgctgtcccttg

SEQ ID NO: 901 - RNA, 41 nt, synthetic construct
  source 1..41: mol_type = other RNA
atagattgctccttacgaggagacggttcctggtgtggggg

SEQ ID NO: 902 - RNA, 41 nt, synthetic construct
  source 1..41: mol_type = other RNA
atagattgctccttacgaggagactcagcatattagagtag

SEQ ID NO: 903 - RNA, 41 nt, synthetic construct
  source 1..41: mol_type = other RNA
atagattgctccttacgaggagactatccctagaagcagct

SEQ ID NO: 904 - RNA, 41 nt, synthetic construct
  source 1..41: mol_type = other RNA
atagattgctccttacgaggagactctatctaatatcagtg

SEQ ID NO: 905 - RNA, 41 nt, synthetic construct
  source 1..41: mol_type = other RNA
atagattgctccttacgaggagacctatactccaccttcca

SEQ ID NO: 906 - RNA, 41 nt, synthetic construct
  source 1..41: mol_type = other RNA
atagattgctccttacgaggagaccccattccattctactg

SEQ ID NO: 907 - RNA, 41 nt, synthetic construct
  source 1..41: mol_type = other RNA
atagattgctccttacgaggagacctccgttgctccacagt

SEQ ID NO: 908 - RNA, 41 nt, synthetic construct
  source 1..41: mol_type = other RNA
atagattgctccttacgaggagactcccctgtcttttcctg

SEQ ID NO: 909 - RNA, 41 nt, synthetic construct
  source 1..41: mol_type = other RNA
atagattgctccttacgaggagacatccctagaagcagcta

SEQ ID NO: 910 - RNA, 41 nt, synthetic construct
  source 1..41: mol_type = other RNA
atagattgctccttacgaggagaccaccccacttggggggc

SEQ ID NO: 911 - RNA, 41 nt, synthetic construct
  source 1..41: mol_type = other RNA
atagattgctccttacgaggagactttctcagcatattaga

SEQ ID NO: 912 - RNA, 41 nt, synthetic construct
  source 1..41: mol_type = other RNA
atagattgctccttacgaggagaccaggtggcttctgtgaa

SEQ ID NO: 913 - RNA, 41 nt, synthetic construct
  source 1..41: mol_type = other RNA
atagattgctccttacgaggagaccccagctcactgggcct

SEQ ID NO: 914 - RNA, 41 nt, synthetic construct
  source 1..41: mol_type = other RNA
atagattgctccttacgaggagacctcagcatattagagta

SEQ ID NO: 915 - RNA, 41 nt, synthetic construct
  source 1..41: mol_type = other RNA
atagattgctccttacgaggagaccattctactggaaggct

SEQ ID NO: 916 - RNA, 41 nt, synthetic construct
  source 1..41: mol_type = other RNA
atagattgctccttacgaggagactcctgtctcaccgacct

SEQ ID NO: 917 - RNA, 41 nt, synthetic construct
  source 1..41: mol_type = other RNA
atagattgctccttacgaggagacgtatccatgcctaccca

SEQ ID NO: 918 - RNA, 41 nt, synthetic construct
  source 1..41: mol_type = other RNA
atagattgctccttacgaggagacaggtggcttctgtgaag

SEQ ID NO: 919 - RNA, 41 nt, synthetic construct
  source 1..41: mol_type = other RNA
atagattgctccttacgaggagacggatcacaggtggaggt

SEQ ID NO: 920 - RNA, 41 nt, synthetic construct
  source 1..41: mol_type = other RNA
atagattgctccttacgaggagactttagcttgctctgagc

SEQ ID NO: 921 - RNA, 41 nt, synthetic construct
  source 1..41: mol_type = other RNA
atagattgctccttacgaggagacgaagcctttggtatcca

SEQ ID NO: 922 - RNA, 41 nt, synthetic construct
  source 1..41: mol_type = other RNA
atagattgctccttacgaggagacctgtctcaccgacctca

SEQ ID NO: 923 - RNA, 41 nt, synthetic construct
  source 1..41: mol_type = other RNA
atagattgctccttacgaggagactgtgaaggagcctgtca

SEQ ID NO: 924 - RNA, 41 nt, synthetic construct
  source 1..41: mol_type = other RNA
atagattgctccttacgaggagacactctgccccctcccac

SEQ ID NO: 925 - RNA, 41 nt, synthetic construct
  source 1..41: mol_type = other RNA
atagattgctccttacgaggagactctcactaatccctgcc

SEQ ID NO: 926 - RNA, 41 nt, synthetic construct
  source 1..41: mol_type = other RNA
atagattgctccttacgaggagactactggaaggctttcag

SEQ ID NO: 927 - RNA, 41 nt, synthetic construct
  source 1..41: mol_type = other RNA
atagattgctccttacgaggagactatactccaccttccac

SEQ ID NO: 928 - RNA, 41 nt, synthetic construct
  source 1..41: mol_type = other RNA
atagattgctccttacgaggagacgcccagctcactgggcc

SEQ ID NO: 929 - RNA, 41 nt, synthetic construct
  source 1..41: mol_type = other RNA
atagattgctccttacgaggagacctctgagctattagaag

SEQ ID NO: 930 - RNA, 41 nt, synthetic construct
  source 1..41: mol_type = other RNA
atagattgctccttacgaggagacgggggctgggtctactg

SEQ ID NO: 931 - RNA, 41 nt, synthetic construct
  source 1..41: mol_type = other RNA
atagattgctccttacgaggagacggattcatgacccagga

SEQ ID NO: 932 - RNA, 41 nt, synthetic construct
  source 1..41: mol_type = other RNA
atagattgctccttacgaggagaccctgctcagttttatcc

SEQ ID NO: 933 - RNA, 41 nt, synthetic construct
  source 1..41: mol_type = other RNA
atagattgctccttacgaggagacctcaactcctctggcag

SEQ ID NO: 934 - RNA, 41 nt, synthetic construct
  source 1..41: mol_type = other RNA
atagattgctccttacgaggagacctgcctcaggctctggt

SEQ ID NO: 935 - RNA, 41 nt, synthetic construct
  source 1..41: mol_type = other RNA
atagattgctccttacgaggagactgtgcccgctgtcccat

SEQ ID NO: 936 - RNA, 41 nt, synthetic construct
  source 1..41: mol_type = other RNA
atagattgctccttacgaggagactccttctctcactaatc

SEQ ID NO: 937 - RNA, 41 nt, synthetic construct
  source 1..41: mol_type = other RNA
atagattgctccttacgaggagacgcttgctctgagctatt

SEQ ID NO: 938 - RNA, 41 nt, synthetic construct
  source 1..41: mol_type = other RNA
atagattgctccttacgaggagactcaactcctctggcaga

SEQ ID NO: 939 - RNA, 41 nt, synthetic construct
  source 1..41: mol_type = other RNA
atagattgctccttacgaggagaccctgtctcaccgacctc

SEQ ID NO: 940 - RNA, 41 nt, synthetic construct
  source 1..41: mol_type = other RNA
atagattgctccttacgaggagacctccacagtggcaccac

SEQ ID NO: 941 - RNA, 41 nt, synthetic construct
  source 1..41: mol_type = other RNA
atagattgctccttacgaggagactccctagaagcagctag

SEQ ID NO: 942 - RNA, 41 nt, synthetic construct
  source 1..41: mol_type = other RNA
atagattgctccttacgaggagacggactcatggtctccac

SEQ ID NO: 943 - RNA, 41 nt, synthetic construct
  source 1..41: mol_type = other RNA
atagattgctccttacgaggagacagcttgctctgagctat

SEQ ID NO: 944 - RNA, 41 nt, synthetic construct
  source 1..41: mol_type = other RNA
atagattgctccttacgaggagacggtatccatgcctaccc

SEQ ID NO: 945 - RNA, 41 nt, synthetic construct
  source 1..41: mol_type = other RNA
atagattgctccttacgaggagacctggtgtggggggggct

SEQ ID NO: 946 - RNA, 41 nt, synthetic construct
  source 1..41: mol_type = other RNA
atagattgctccttacgaggagaccactgggtagtggcaga

SEQ ID NO: 947 - RNA, 41 nt, synthetic construct
  source 1..41: mol_type = other RNA
atagattgctccttacgaggagactgcagagtatttctata

SEQ ID NO: 948 - RNA, 41 nt, synthetic construct
  source 1..41: mol_type = other RNA
atagattgctccttacgaggagacgagtagatgtcccgttc

SEQ ID NO: 949 - RNA, 41 nt, synthetic construct
  source 1..41: mol_type = other RNA
atagattgctccttacgaggagaccggggtctcccagccac

SEQ ID NO: 950 - RNA, 41 nt, synthetic construct
  source 1..41: mol_type = other RNA
atagattgctccttacgaggagacgagcaacggcggaaggt

SEQ ID NO: 951 - RNA, 41 nt, synthetic construct
  source 1..41: mol_type = other RNA
atagattgctccttacgaggagactccctccaacaatatta

SEQ ID NO: 952 - RNA, 41 nt, synthetic construct
  source 1..41: mol_type = other RNA
atagattgctccttacgaggagacactgcgtggagtgccga

SEQ ID NO: 953 - RNA, 41 nt, synthetic construct
  source 1..41: mol_type = other RNA
atagattgctccttacgaggagacagcatttccggggtctc

SEQ ID NO: 954 - RNA, 41 nt, synthetic construct
  source 1..41: mol_type = other RNA
atagattgctccttacgaggagaccattcccccctcttaat

SEQ ID NO: 955 - RNA, 41 nt, synthetic construct
  source 1..41: mol_type = other RNA
atagattgctccttacgaggagacaacattaacgggccccg

SEQ ID NO: 956 - RNA, 41 nt, synthetic construct
  source 1..41: mol_type = other RNA
atagattgctccttacgaggagacccccctcttaatcccca

SEQ ID NO: 957 - RNA, 41 nt, synthetic construct
  source 1..41: mol_type = other RNA
atagattgctccttacgaggagaccactccatccagcctgt

SEQ ID NO: 958 - RNA, 41 nt, synthetic construct
  source 1..41: mol_type = other RNA
atagattgctccttacgaggagactcctgggccctcctcct

SEQ ID NO: 959 - RNA, 41 nt, synthetic construct
  source 1..41: mol_type = other RNA
atagattgctccttacgaggagacgagaccaccagacggct

SEQ ID NO: 960 - RNA, 41 nt, synthetic construct
  source 1..41: mol_type = other RNA
atagattgctccttacgaggagacgctccggggctgcgggc

SEQ ID NO: 961 - RNA, 41 nt, synthetic construct
  source 1..41: mol_type = other RNA
atagattgctccttacgaggagacccggggtctcccagcca

SEQ ID NO: 962 - RNA, 41 nt, synthetic construct
  source 1..41: mol_type = other RNA
atagattgctccttacgaggagacggctcacctgcacccta

SEQ ID NO: 963 - RNA, 41 nt, synthetic construct
  source 1..41: mol_type = other RNA
atagattgctccttacgaggagacccgctacctgcctaaac

SEQ ID NO: 964 - RNA, 41 nt, synthetic construct
  source 1..41: mol_type = other RNA
atagattgctccttacgaggagacgcactccatccagcctg

SEQ ID NO: 965 - RNA, 41 nt, synthetic construct
  source 1..41: mol_type = other RNA
atagattgctccttacgaggagacacgggccccggtactaa

SEQ ID NO: 966 - RNA, 41 nt, synthetic construct
  source 1..41: mol_type = other RNA
atagattgctccttacgaggagacataatctccatcctcgt

SEQ ID NO: 967 - RNA, 41 nt, synthetic construct
  source 1..41: mol_type = other RNA
atagattgctccttacgaggagacatccccactccaatcct

SEQ ID NO: 968 - RNA, 41 nt, synthetic construct
  source 1..41: mol_type = other RNA
atagattgctccttacgaggagacgcatttccggggtctcc

SEQ ID NO: 969 - RNA, 41 nt, synthetic construct
  source 1..41: mol_type = other RNA
atagattgctccttacgaggagacactaacttctcctgggc

SEQ ID NO: 970 - RNA, 41 nt, synthetic construct; identical to SEQ ID NO: 649
  source 1..41: mol_type = other RNA

SEQ ID NO: 971 - RNA, 41 nt, synthetic construct
  source 1..41: mol_type = other RNA
atagattgctccttacgaggagaccctccctggcctccagc

SEQ ID NO: 972 - RNA, 41 nt, synthetic construct
  source 1..41: mol_type = other RNA
atagattgctccttacgaggagactggggtgtgggtactgg

SEQ ID NO: 973 - RNA, 41 nt, synthetic construct
  source 1..41: mol_type = other RNA
atagattgctccttacgaggagacggctgcaaacgggacct

SEQ ID NO: 974 - RNA, 41 nt, synthetic construct
  source 1..41: mol_type = other RNA
atagattgctccttacgaggagacccgacttcccgctacct

SEQ ID NO: 975 - RNA, 41 nt, synthetic construct
  source 1..41: mol_type = other RNA
atagattgctccttacgaggagaccctggcacccatacctt

SEQ ID NO: 976 - RNA, 41 nt, synthetic construct
  source 1..41: mol_type = other RNA
atagattgctccttacgaggagacggcctcgccctccccag

SEQ ID NO: 977 - RNA, 41 nt, synthetic construct
  source 1..41: mol_type = other RNA
atagattgctccttacgaggagactctgctcatctagccgt

SEQ ID NO: 978 - RNA, 41 nt, synthetic construct
  source 1..41: mol_type = other RNA
atagattgctccttacgaggagacccgaggccgcgcgcacc

SEQ ID NO: 979 - RNA, 41 nt, synthetic construct
  source 1..41: mol_type = other RNA
atagattgctccttacgaggagacctttggggttggggtga

SEQ ID NO: 980 - RNA, 41 nt, synthetic construct
  source 1..41: mol_type = other RNA
atagattgctccttacgaggagacagtaccggggcccgtta

SEQ ID NO: 981 - RNA, 41 nt, synthetic construct
  source 1..41: mol_type = other RNA
atagattgctccttacgaggagacctccaaggtatgggtgc

SEQ ID NO: 982 - RNA, 41 nt, synthetic construct
  source 1..41: mol_type = other RNA
atagattgctccttacgaggagactctctctctttctgagg

SEQ ID NO: 983 - RNA, 41 nt, synthetic construct
  source 1..41: mol_type = other RNA
atagattgctccttacgaggagacggggttttgtcctcact

SEQ ID NO: 984 - RNA, 41 nt, synthetic construct
  source 1..41: mol_type = other RNA
atagattgctccttacgaggagacatattgttggagggaga

SEQ ID NO: 985 - RNA, 41 nt, synthetic construct
  source 1..41: mol_type = other RNA
atagattgctccttacgaggagacacgctgtctggggaggg

SEQ ID NO: 986 - RNA, 41 nt, synthetic construct
  source 1..41: mol_type = other RNA
atagattgctccttacgaggagacagaggggggaatgtaac

SEQ ID NO: 987 - RNA, 41 nt, synthetic construct
  source 1..41: mol_type = other RNA
atagattgctccttacgaggagacgggttggggtgatgctc

SEQ ID NO: 988 - RNA, 41 nt, synthetic construct
  source 1..41: mol_type = other RNA
atagattgctccttacgaggagaccagcccaattaggattt

SEQ ID NO: 989 - RNA, 41 nt, synthetic construct
  source 1..41: mol_type = other RNA
atagattgctccttacgaggagacgagggagaagtacaggg

SEQ ID NO: 990 - RNA, 41 nt, synthetic construct
  source 1..41: mol_type = other RNA
atagattgctccttacgaggagacctgaggctagaggactg

SEQ ID NO: 991 - RNA, 41 nt, synthetic construct
  source 1..41: mol_type = other RNA
atagattgctccttacgaggagactgaggctagaggactga

SEQ ID NO: 992 - RNA, 41 nt, synthetic construct
  source 1..41: mol_type = other RNA
atagattgctccttacgaggagacccgctgttgccgccgct

SEQ ID NO: 993 - RNA, 41 nt, synthetic construct
  source 1..41: mol_type = other RNA
atagattgctccttacgaggagacgctccccagagacatca

SEQ ID NO: 994 - RNA, 41 nt, synthetic construct
  source 1..41: mol_type = other RNA
atagattgctccttacgaggagacacgtggacgcgcaggct

SEQ ID NO: 995 - RNA, 41 nt, synthetic construct
  source 1..41: mol_type = other RNA
atagattgctccttacgaggagacttggagggagaagtaca

SEQ ID NO: 996 - RNA, 41 nt, synthetic construct
  source 1..41: mol_type = other RNA
atagattgctccttacgaggagaccgccgttgctccaaggt

SEQ ID NO: 997 - RNA, 41 nt, synthetic construct
  source 1..41: mol_type = other RNA
atagattgctccttacgaggagacgcaccccgcctgaggag

SEQ ID NO: 998 - RNA, 41 nt, synthetic construct
  source 1..41: mol_type = other RNA
atagattgctccttacgaggagactgaagagctgatgctcg

SEQ ID NO: 999 - RNA, 41 nt, synthetic construct
  source 1..41: mol_type = other RNA
atagattgctccttacgaggagacccgccgctgctgctgct

SEQ ID NO: 1000 - RNA, 41 nt, synthetic construct
  source 1..41: mol_type = other RNA
atagattgctccttacgaggagacctgctactgtgccccac

SEQ ID NO: 1001 - RNA, 41 nt, synthetic construct
  source 1..41: mol_type = other RNA
atagattgctccttacgaggagactgtcctcactctgagcg

SEQ ID NO: 1002 - RNA, 41 nt, synthetic construct
  source 1..41: mol_type = other RNA
atagattgctccttacgaggagacaggcaggtagcgggaag

SEQ ID NO: 1003 - RNA, 41 nt, synthetic construct
  source 1..41: mol_type = other RNA
atagattgctccttacgaggagacggcaggtagcgggaagt

SEQ ID NO: 1004 - RNA, 41 nt, synthetic construct
  source 1..41: mol_type = other RNA
atagattgctccttacgaggagacgtaccggggcccgttaa

SEQ ID NO: 1005 - RNA, 41 nt, synthetic construct
  source 1..41: mol_type = other RNA
atagattgctccttacgaggagacaatcagagaggatcttc

SEQ ID NO: 1006 - RNA, 41 nt, synthetic construct
  source 1..41: mol_type = other RNA
atagattgctccttacgaggagacgggttttgtcctcactc

SEQ ID NO: 1007 - RNA, 41 nt, synthetic construct
  source 1..41: mol_type = other RNA
atagattgctccttacgaggagaccaccttcacgtggacgc

SEQ ID NO: 1008 - RNA, 41 nt, synthetic construct
  source 1..41: mol_type = other RNA
atagattgctccttacgaggagacatcagagaggatcttcc

SEQ ID NO: 1009 - RNA, 41 nt, synthetic construct
  source 1..41: mol_type = other RNA
atagattgctccttacgaggagactcctcactctgagcgtc

SEQ ID NO: 1010 - RNA, 41 nt, synthetic construct
  source 1..41: mol_type = other RNA
atagattgctccttacgaggagacggatttggggttttgtc

SEQ ID NO: 1011 - RNA, 41 nt, synthetic construct
  source 1..41: mol_type = other RNA
atagattgctccttacgaggagacggggttggggtgatgct

SEQ ID NO: 1012 - RNA, 41 nt, synthetic construct
  source 1..41: mol_type = other RNA
atagattgctccttacgaggagacgggggtcttctctgctc

SEQ ID NO: 1013 - RNA, 41 nt, synthetic construct
  source 1..41: mol_type = other RNA
atagattgctccttacgaggagacgcagcccaattaggatt

SEQ ID NO: 1014 - RNA, 41 nt, synthetic construct
  source 1..41: mol_type = other RNA
atagattgctccttacgaggagacgacgctgtctggggagg

SEQ ID NO: 1015 - RNA, 41 nt, synthetic construct
  source 1..41: mol_type = other RNA
atagattgctccttacgaggagacgggtgatgctcttcggg

SEQ ID NO: 1016 - RNA, 41 nt, synthetic construct
  source 1..41: mol_type = other RNA
atagattgctccttacgaggagacgtcctcactctgagcgt

SEQ ID NO: 1017 - RNA, 41 nt, synthetic construct
  source 1..41: mol_type = other RNA
atagattgctccttacgaggagaccgatggggctcggggtg

SEQ ID NO: 1018 - RNA, 41 nt, synthetic construct
  source 1..41: mol_type = other RNA
atagattgctccttacgaggagacatgtttaatcagagagg

SEQ ID NO: 1019 - RNA, 41 nt, synthetic construct
  source 1..41: mol_type = other RNA
atagattgctccttacgaggagacgttaatattgttggagg

SEQ ID NO: 1020 - RNA, 41 nt, synthetic construct
  source 1..41: mol_type = other RNA
atagattgctccttacgaggagacgagtggggattaagagg

SEQ ID NO: 1021 - RNA, 20 nt, synthetic construct
  source 1..20: mol_type = other RNA
gacagcccagtcctacccca

SEQ ID NO: 1022 - RNA, 20 nt, synthetic construct
  source 1..20: mol_type = other RNA
ttcagggcttggggctggtg

SEQ ID NO: 1023 - RNA, 20 nt, synthetic construct
  source 1..20: mol_type = other RNA
cctttactccaaacaccccc

SEQ ID NO: 1024 - RNA, 20 nt, synthetic construct
  source 1..20: mol_type = other RNA
ccccccacccctcatcataa

SEQ ID NO: 1025 - RNA, 20 nt, synthetic construct
  source 1..20: mol_type = other RNA
ttcagtctggtgggttttct

SEQ ID NO: 1026 - RNA, 20 nt, synthetic construct
  source 1..20: mol_type = other RNA
tcacttgcccaaagctacac

SEQ ID NO: 1027 - RNA, 20 nt, synthetic construct
  source 1..20: mol_type = other RNA
gtgggttttctgctccatcc

SEQ ID NO: 1028 - RNA, 20 nt, synthetic construct
  source 1..20: mol_type = other RNA
ccggagccactgatgcctgg

SEQ ID NO: 1029 - RNA, 20 nt, synthetic construct
  source 1..20: mol_type = other RNA
gactcagtctcctagggatt

SEQ ID NO: 1030 - RNA, 20 nt, synthetic construct
  source 1..20: mol_type = other RNA
gcctatgtccaagccatttc

SEQ ID NO: 1031 - RNA, 20 nt, synthetic construct
  source 1..20: mol_type = other RNA
cctcaggccctcatctccac

SEQ ID NO: 1032 - RNA, 20 nt, synthetic construct
  source 1..20: mol_type = other RNA
tccaagccatttcccctctc

SEQ ID NO: 1033 - RNA, 20 nt, synthetic construct
  source 1..20: mol_type = other RNA
aaaggctgagatgggcccga

SEQ ID NO: 1034 - RNA, 20 nt, synthetic construct
  source 1..20: mol_type = other RNA
aaattccagtgtgaaaggct

SEQ ID NO: 1035 - RNA, 20 nt, synthetic construct
  source 1..20: mol_type = other RNA
gagatgatataaaacaggtc

SEQ ID NO: 1036 - RNA, 20 nt, synthetic construct
  source 1..20: mol_type = other RNA
gggaggggaaagaggagggg

SEQ ID NO: 1037 - RNA, 20 nt, synthetic construct
  source 1..20: mol_type = other RNA
aagaacatggaggcccggga

SEQ ID NO: 1038 - RNA, 20 nt, synthetic construct
  source 1..20: mol_type = other RNA
gggctggtggagggaggggc

SEQ ID NO: 1039 - RNA, 20 nt, synthetic construct
  source 1..20: mol_type = other RNA
atgcctggtcttctgtgcct

SEQ ID NO: 1040 - RNA, 20 nt, synthetic construct
  source 1..20: mol_type = other RNA
tgttcagggcttggggctgg

SEQ ID NO: 1041 - RNA, 20 nt, synthetic construct
  source 1..20: mol_type = other RNA
ctccaggtaatgccctctgg

SEQ ID NO: 1042 - RNA, 20 nt, synthetic construct
  source 1..20: mol_type = other RNA
agggctccccaggcccaccc

SEQ ID NO: 1043 - RNA, 20 nt, synthetic construct
  source 1..20: mol_type = other RNA
ttggctggactggacggaga

SEQ ID NO: 1044 - RNA, 20 nt, synthetic construct
  source 1..20: mol_type = other RNA
gagctaaggaagcctcggag

SEQ ID NO: 1045 - RNA, 20 nt, synthetic construct
  source 1..20: mol_type = other RNA
ccctctggggaggggaaaga

SEQ ID NO: 1046 - RNA, 20 nt, synthetic construct
  source 1..20: mol_type = other RNA
ctccaaacaccccccagccc

SEQ ID NO: 1047 - RNA, 20 nt, synthetic construct
  source 1..20: mol_type = other RNA
gggagccagtcagctaggaa

SEQ ID NO: 1048 - RNA, 20 nt, synthetic construct
  source 1..20: mol_type = other RNA
ggcccgaggcccctggccta

SEQ ID NO: 1049 - RNA, 20 nt, synthetic construct
  source 1..20: mol_type = other RNA
gaggcagctgctccaggtaa

SEQ ID NO: 1050 - RNA, 20 nt, synthetic construct
  source 1..20: mol_type = other RNA
gagggaggggcctgaaattc

SEQ ID NO: 1051 - RNA, 20 nt, synthetic construct
  source 1..20: mol_type = other RNA
gagagggccagaaatcaccc

SEQ ID NO: 1052 - RNA, 20 nt, synthetic construct
  source 1..20: mol_type = other RNA
aagaagcccctcacccctct

SEQ ID NO: 1053 - RNA, 20 nt, synthetic construct
  source 1..20: mol_type = other RNA
ccccagacagggaaactgag

SEQ ID NO: 1054 - RNA, 20 nt, synthetic construct
  source 1..20: mol_type = other RNA
gggctggaagtggctccaag

SEQ ID NO: 1055 - RNA, 20 nt, synthetic construct
  source 1..20: mol_type = other RNA
ctccaggctgtgttcagggc

SEQ ID NO: 1056 - RNA, 20 nt, synthetic construct
  source 1..20: mol_type = other RNA
gtcttctgtgcctttactcc

SEQ ID NO: 1057 - RNA, 20 nt, synthetic construct
  source 1..20: mol_type = other RNA
cacagggggtggggctggaa

SEQ ID NO: 1058 - RNA, 20 nt, synthetic construct
  source 1..20: mol_type = other RNA
gactggacggagatcagtcc

SEQ ID NO: 1059 - RNA, 20 nt, synthetic construct
  source 1..20: mol_type = other RNA
gacgggtgccccccacccct

SEQ ID NO: 1060 - RNA, 20 nt, synthetic construct
  source 1..20: mol_type = other RNA
tgtccaagccatttcccctc

SEQ ID NO: 1061 - RNA, 20 nt, synthetic construct
  source 1..20: mol_type = other RNA
agatgggcccgaggcccctg

SEQ ID NO: 1062 - RNA, 20 nt, synthetic construct
  source 1..20: mol_type = other RNA
ggtcctcagtgcctgctgcc

SEQ ID NO: 1063 - RNA, 20 nt, synthetic construct
  source 1..20: mol_type = other RNA
cagggctggcgggacagcag

SEQ ID NO: 1064 - RNA, 20 nt, synthetic construct
  source 1..20: mol_type = other RNA
ccttgatgttcagtctggtg

SEQ ID NO: 1065 - RNA, 20 nt, synthetic construct
  source 1..20: mol_type = other RNA
aggcctggagagggccagaa

SEQ ID NO: 1066 - RNA, 20 nt, synthetic construct
  source 1..20: mol_type = other RNA
ccctggagatgatataaaac

SEQ ID NO: 1067 - RNA, 20 nt, synthetic construct
  source 1..20: mol_type = other RNA
acctgaagaacatggaggcc

SEQ ID NO: 1068 - RNA, 20 nt, synthetic construct
  source 1..20: mol_type = other RNA
cctggtcttctgtgccttta

SEQ ID NO: 1069 - RNA, 20 nt, synthetic construct
  source 1..20: mol_type = other RNA
acctttgcccagcgccctgg

SEQ ID NO: 1070 - RNA, 20 nt, synthetic construct
  source 1..20: mol_type = other RNA
cccaaagctacacagggggt

SEQ ID NO: 1071 - RNA, 20 nt, synthetic construct
  source 1..20: mol_type = other RNA
gtggagggaggggcctgaaa

SEQ ID NO: 1072 - RNA, 20 nt, synthetic construct
  source 1..20: mol_type = other RNA
tgcctttactccaaacaccc

SEQ ID NO: 1073 - RNA, 20 nt, synthetic construct
  source 1..20: mol_type = other RNA
ctccatcccacccacctccc

SEQ ID NO: 1074 - RNA, 20 nt, synthetic construct
  source 1..20: mol_type = other RNA
atgttcagtctggtgggttt

SEQ ID NO: 1075 - RNA, 20 nt, synthetic construct
  source 1..20: mol_type = other RNA
ctagagctaaggaagcctcg

SEQ ID NO: 1076 - RNA, 20 nt, synthetic construct
  source 1..20: mol_type = other RNA
ggaaggaatgagggctcccc

SEQ ID NO: 1077 - RNA, 20 nt, synthetic construct
  source 1..20: mol_type = other RNA
ggctgcagggctggcgggac

SEQ ID NO: 1078 - RNA, 20 nt, synthetic construct
  source 1..20: mol_type = other RNA
atgccctctggggaggggaa

SEQ ID NO: 1079 - RNA, 20 nt, synthetic construct
  source 1..20: mol_type = other RNA
aaacaggtcagaaccctcct

SEQ ID NO: 1080 - RNA, 20 nt, synthetic construct
  source 1..20: mol_type = other RNA
gggctggaggaagccttaga

SEQ ID NO: 1081 - RNA, 20 nt, synthetic construct
  source 1..20: mol_type = other RNA
ttctcaagtctgaagaagcc

SEQ ID NO: 1082 - RNA, 20 nt, synthetic construct
  source 1..20: mol_type = other RNA
agctcatctgggctgcaggg

SEQ ID NO: 1083 - RNA, 20 nt, synthetic construct
  source 1..20: mol_type = other RNA
gggatttcccaactctcccg

SEQ ID NO: 1084 - RNA, 20 nt, synthetic construct
  source 1..20: mol_type = other RNA
gacggagatcagtccagacc

SEQ ID NO: 1085 - RNA, 20 nt, synthetic construct
  source 1..20: mol_type = other RNA
tgaaaggctgagatgggccc

SEQ ID NO: 1086 - RNA, 20 nt, synthetic construct
  source 1..20: mol_type = other RNA
cctgtctgctcagttcatcc

SEQ ID NO: 1087 - RNA, 20 nt, synthetic construct
  source 1..20: mol_type = other RNA
caggttcccccctcattctt

SEQ ID NO: 1088 - RNA, 20 nt, synthetic construct
  source 1..20: mol_type = other RNA
gtcagcaggtgacctttgcc

SEQ ID NO: 1089 - RNA, 20 nt, synthetic construct
  source 1..20: mol_type = other RNA
gaggaagccttagacagccc

SEQ ID NO: 1090 - RNA, 20 nt, synthetic construct
  source 1..20: mol_type = other RNA
ctgcatctggacaccctgcc

SEQ ID NO: 1091 - RNA, 20 nt, synthetic construct
  source 1..20: mol_type = other RNA
cccagcgccctgggtcctca

SEQ ID NO: 1092 - RNA, 20 nt, synthetic construct
  source 1..20: mol_type = other RNA
cccagcccagccagcaagcc

SEQ ID NO: 1093 - RNA, 20 nt, synthetic construct
  source 1..20: mol_type = other RNA
ggttttctgctccatcccac

SEQ ID NO: 1094 - RNA, 20 nt, synthetic construct
  source 1..20: mol_type = other RNA
taaaacaggtcagaaccctc

SEQ ID NO: 1095 - RNA, 20 nt, synthetic construct
  source 1..20: mol_type = other RNA
ctcagttcatccctagaggc

SEQ ID NO: 1096 - RNA, 20 nt, synthetic construct
  source 1..20: mol_type = other RNA
gacaccctgcctcaggccct

SEQ ID NO: 1097 - RNA, 20 nt, synthetic construct
  source 1..20: mol_type = other RNA
gcgggacagcagcgtggact

SEQ ID NO: 1098 - RNA, 20 nt, synthetic construct
  source 1..20: mol_type = other RNA
aagaggggcaagaggagctc

SEQ ID NO: 1099 - RNA, 20 nt, synthetic construct
  source 1..20: mol_type = other RNA
catctggacaccctgcctca

SEQ ID NO: 1100 - RNA, 20 nt, synthetic construct
  source 1..20: mol_type = other RNA
gaggcccgggaggggtgtca

SEQ ID NO: 1101 - RNA, 20 nt, synthetic construct
  source 1..20: mol_type = other RNA
cctgctgccctggagatgat

SEQ ID NO: 1102 - RNA, 20 nt, synthetic construct
  source 1..20: mol_type = other RNA
aggaagcctcggagctggac

SEQ ID NO: 1103 - RNA, 20 nt, synthetic construct
  source 1..20: mol_type = other RNA
tctgctcagttcatccctag

SEQ ID NO: 1104 - RNA, 20 nt, synthetic construct
  source 1..20: mol_type = other RNA
gaagtggctccaagtgcagg

SEQ ID NO: 1105 - RNA, 20 nt, synthetic construct
  source 1..20: mol_type = other RNA
gctggactggacggagatca

SEQ ID NO: 1106 - RNA, 20 nt, synthetic construct
  source 1..20: mol_type = other RNA
gagaagcacttgctagagct

SEQ ID NO: 1107 - RNA, 20 nt, synthetic construct
  source 1..20: mol_type = other RNA
ctgccctggagatgatataa

SEQ ID NO: 1108 - RNA, 20 nt, synthetic construct
  source 1..20: mol_type = other RNA
atataaaacaggtcagaacc

SEQ ID NO: 1109 - RNA, 20 nt, synthetic construct
  source 1..20: mol_type = other RNA
gctccaagtgcaggttcccc

SEQ ID NO: 1110 - RNA, 20 nt, synthetic construct
  source 1..20: mol_type = other RNA
ggctgggcagggagctcctc

SEQ ID NO: 1111 - RNA, 20 nt, synthetic construct
  source 1..20: mol_type = other RNA
gacataggccaggggcctcg

SEQ ID NO: 1112 - RNA, 20 nt, synthetic construct
  source 1..20: mol_type = other RNA
ggcctggggagccctcattc

SEQ ID NO: 1113 - RNA, 20 nt, synthetic construct
  source 1..20: mol_type = other RNA
ggctggggggtgtttggagt

SEQ ID NO: 1114 - RNA, 20 nt, synthetic construct
  source 1..20: mol_type = other RNA
ggtgggatggagcagaaaac

SEQ ID NO: 1115 - RNA, 20 nt, synthetic construct
  source 1..20: mol_type = other RNA
gcttggacataggccagggg

SEQ ID NO: 1116 - RNA, 20 nt, synthetic construct
  source 1..20: mol_type = other RNA
agggcctgaggcagggtgtc

SEQ ID NO: 1117 - RNA, 20 nt, synthetic construct
  source 1..20: mol_type = other RNA
aggcagggtgtccagatgca

SEQ ID NO: 1118 - RNA, 20 nt, synthetic construct
  source 1..20: mol_type = other RNA
tcccgccagccctgcagccc

SEQ ID NO: 1119 - RNA, 20 nt, synthetic construct
  source 1..20: mol_type = other RNA
cccctcttcatcctcctccc

SEQ ID NO: 1120 - RNA, 20 nt, synthetic construct
  source 1..20: mol_type = other RNA
aacatcaaggcacctgcggt

SEQ ID NO: 1121 - RNA, 20 nt, synthetic construct
  source 1..20: mol_type = other RNA
agctcaggaactgggggtgg

SEQ ID NO: 1122 - RNA, 20 nt, synthetic construct
  source 1..20: mol_type = other RNA
ttcttcaggttatgatgagg

SEQ ID NO: 1123 - RNA, 20 nt, synthetic construct
  source 1..20: mol_type = other RNA
gctttgggcaagtgacaccc

SEQ ID NO: 1124 - RNA, 20 nt, synthetic construct
  source 1..20: mol_type = other RNA
aggggggaacctgcacttgg

SEQ ID NO: 1125 - RNA, 20 nt, synthetic construct
  source 1..20: mol_type = other RNA
gcttgggctggggggtgttt

SEQ ID NO: 1126 - RNA, 20 nt, synthetic construct
  source 1..20: mol_type = other RNA
aactgagcagacaggcagga

SEQ ID NO: 1127 - RNA, 20 nt, synthetic construct
  source 1..20: mol_type = other RNA
tgtgtctttgggtgatttct

SEQ ID NO: 1128 - RNA, 20 nt, synthetic construct
  source 1..20: mol_type = other RNA
tgatgaggggtggggggcac

SEQ ID NO: 1129 - RNA, 20 nt, synthetic construct
  source 1..20: mol_type = other RNA
ggcagggagctcctcttgcc

SEQ ID NO: 1130 - RNA, 20 nt, synthetic construct
  source 1..20: mol_type = other RNA
aggggtggggggcacccgtc

SEQ ID NO: 1131 - RNA, 20 nt, synthetic construct
  source 1..20: mol_type = other RNA
cctggagcagctgcctctag

SEQ ID NO: 1132 - RNA, 20 nt, synthetic construct
  source 1..20: mol_type = other RNA
gggatgaactgagcagacag

SEQ ID NO: 1133 - RNA, 20 nt, synthetic construct
  source 1..20: mol_type = other RNA
aggcttcctccagccctaag

SEQ ID NO: 1134 - RNA, 20 nt, synthetic construct
  source 1..20: mol_type = other RNA
gagatgagggcctgaggcag

SEQ ID NO: 1135 - RNA, 20 nt, synthetic construct
  source 1..20: mol_type = other RNA
ggatggagcagaaaacccac

SEQ ID NO: 1136 - RNA, 20 nt, synthetic construct
  source 1..20: mol_type = other RNA
aagaatgaggggggaacctg

SEQ ID NO: 1137 - RNA, 20 nt, synthetic construct
  source 1..20: mol_type = other RNA
tttggagtaaaggcacagaa

SEQ ID NO: 1138 - RNA, 20 nt, synthetic construct
  source 1..20: mol_type = other RNA
gagtagaggggtgaggggct

SEQ ID NO: 1139 - RNA, 20 nt, synthetic construct
  source 1..20: mol_type = other RNA
acctgttttatatcatctcc

SEQ ID NO: 1140 - RNA, 20 nt, synthetic construct
  source 1..20: mol_type = other RNA
gtgagaggggaaatggcttg

SEQ ID NO: 1141 - RNA, 20 nt, synthetic construct
  source 1..20: mol_type = other RNA
tgtagctttgggcaagtgac

SEQ ID NO: 1142 - RNA, 20 nt, synthetic construct
  source 1..20: mol_type = other RNA
tgtctttgggtgatttctgg

SEQ ID NO: 1143 - RNA, 20 nt, synthetic construct
  source 1..20: mol_type = other RNA
tatcatctccagggcagcag

SEQ ID NO: 1144 - RNA, 20 nt, synthetic construct
  source 1..20: mol_type = other RNA
gagcagaaaacccaccagac

SEQ ID NO: 1145 - RNA, 20 nt, synthetic construct
  source 1..20: mol_type = other RNA
ggagactgagtccacgctgc

SEQ ID NO: 1146 - RNA, 20 nt, synthetic construct
  source 1..20: mol_type = other RNA
cagcccagatgagctcagga

SEQ ID NO: 1147 - RNA, 20 nt, synthetic construct
  source 1..20: mol_type = other RNA
ggtggcttgggctggggggt

SEQ ID NO: 1148 - RNA, 20 nt, synthetic construct
  source 1..20: mol_type = other RNA
aggggcttcttcagacttga

SEQ ID NO: 1149 - RNA, 20 nt, synthetic construct
  source 1..20: mol_type = other RNA
cacttggagccacttccagc

SEQ ID NO: 1150 - RNA, 20 nt, synthetic construct
  source 1..20: mol_type = other RNA
cagcaagcgggcgggagagt

SEQ ID NO: 1151 - RNA, 20 nt, synthetic construct
  source 1..20: mol_type = other RNA
ggcaaaggtcacctgctgac

SEQ ID NO: 1152 - RNA, 20 nt, synthetic construct
  source 1..20: mol_type = other RNA
tctttgggtgatttctggcc

SEQ ID NO: 1153 - RNA, 20 nt, synthetic construct
  source 1..20: mol_type = other RNA
tcatctccagggcagcaggc

SEQ ID NO: 1154 - RNA, 20 nt, synthetic construct
  source 1..20: mol_type = other RNA
agcagacaggcaggagggtt

SEQ ID NO: 1155 - RNA, 20 nt, synthetic construct
  source 1..20: mol_type = other RNA
aggacccagggcgctgggca

SEQ ID NO: 1156 - RNA, 20 nt, synthetic construct
  source 1..20: mol_type = other RNA
gggggtgtttggagtaaagg

SEQ ID NO: 1157 - RNA, 20 nt, synthetic construct
  source 1..20: mol_type = other RNA
gggtaggactgggctgtcta

SEQ ID NO: 1158 - RNA, 20 nt, synthetic construct
  source 1..20: mol_type = other RNA
ggtgatttctggccctctcc

SEQ ID NO: 1159 - RNA, 20 nt, synthetic construct
  source 1..20: mol_type = other RNA
gagcagctgcctctagggat

SEQ ID NO: 1160 - RNA, 20 nt, synthetic construct
  source 1..20: mol_type = other RNA
ctgtgtgtctttgggtgatt

SEQ ID NO: 1161 - RNA, 20 nt, synthetic construct
  source 1..20: mol_type = other RNA
ctgaccagtggagatgaggg

SEQ ID NO: 1162 - RNA, 20 nt, synthetic construct
  source 1..20: mol_type = other RNA
atgaggggtggggggcaccc

SEQ ID NO: 1163 - RNA, 20 nt, synthetic construct
  source 1..20: mol_type = other RNA
tctaaggcttcctccagccc

SEQ ID NO: 1164 - RNA, 20 nt, synthetic construct
  source 1..20: mol_type = other RNA
gaatttcaggcccctccctc

SEQ ID NO: 1165 - RNA, 20 nt, synthetic construct
  source 1..20: mol_type = other RNA
agcctgaagaatgagggggg

SEQ ID NO: 1166 - RNA, 20 nt, synthetic construct
  source 1..20: mol_type = other RNA
gggggcacccgtccagctcc

SEQ ID NO: 1167 - RNA, 20 nt, synthetic construct
  source 1..20: mol_type = other RNA
aaggcacagaagaccaggca

SEQ ID NO: 1168 - RNA, 20 nt, synthetic construct
  source 1..20: mol_type = other RNA
accagtggagatgagggcct

SEQ ID NO: 1169 - RNA, 20 nt, synthetic construct
  source 1..20: mol_type = other RNA
ggctgtctaaggcttcctcc

SEQ ID NO: 1170 - RNA, 20 nt, synthetic construct
  source 1..20: mol_type = other RNA
ggggtgggcctggggagccc

SEQ ID NO: 1171 - RNA, 20 nt, synthetic construct
  source 1..20: mol_type = other RNA
tagctttgggcaagtgacac

SEQ ID NO: 1172 - RNA, 20 nt, synthetic construct
  source 1..20: mol_type = other RNA
gagccacttccagccccacc

SEQ ID NO: 1173 - RNA, 20 nt, synthetic construct
  source 1..20: mol_type = other RNA
atttctggccctctccaggc

SEQ ID NO: 1174 - RNA, 20 nt, synthetic construct
  source 1..20: mol_type = other RNA
actggctccccagggagagg

SEQ ID NO: 1175 - RNA, 20 nt, synthetic construct
  source 1..20: mol_type = other RNA
gccctctccaggcctcagtt

SEQ ID NO: 1176 - RNA, 20 nt, synthetic construct
  source 1..20: mol_type = other RNA
ggactgggctgtctaaggct

SEQ ID NO: 1177 - RNA, 20 nt, synthetic construct
  source 1..20: mol_type = other RNA
ctgtcccgccagccctgcag

SEQ ID NO: 1178 - RNA, 20 nt, synthetic construct
  source 1..20: mol_type = other RNA
ggcaagtgacacccctcccg

SEQ ID NO: 1179 - RNA, 20 nt, synthetic construct
  source 1..20: mol_type = other RNA
agaacaagtgggtggcttgg

SEQ ID NO: 1180 - RNA, 20 nt, synthetic construct
  source 1..20: mol_type = other RNA
aacacagcctggagtagagg

SEQ ID NO: 1181 - RNA, 20 nt, synthetic construct
  source 1..20: mol_type = other RNA
tctggggtaggactgggctg

SEQ ID NO: 1182 - RNA, 20 nt, synthetic construct
  source 1..20: mol_type = other RNA
gaggggtgaggggcttcttc

SEQ ID NO: 1183 - RNA, 20 nt, synthetic construct
  source 1..20: mol_type = other RNA
cggtctggactgatctccgt

SEQ ID NO: 1184 - RNA, 20 nt, synthetic construct
  source 1..20: mol_type = other RNA
gctgggctgggcagggagct

SEQ ID NO: 1185 - RNA, 20 nt, synthetic construct
  source 1..20: mol_type = other RNA
gggagccctcattccttcct

SEQ ID NO: 1186 - RNA, 20 nt, synthetic construct
  source 1..20: mol_type = other RNA
gagtaaaggcacagaagacc

SEQ ID NO: 1187 - RNA, 20 nt, synthetic construct
  source 1..20: mol_type = other RNA
gcaagtgcttctccaggctt

SEQ ID NO: 1188 - RNA, 20 nt, synthetic construct
  source 1..20: mol_type = other RNA
agaggggaaatggcttggac

SEQ ID NO: 1189 - RNA, 20 nt, synthetic construct
  source 1..20: mol_type = other RNA
agtccacgctgctgtcccgc

SEQ ID NO: 1190 - RNA, 20 nt, synthetic construct
  source 1..20: mol_type = other RNA
cctctagggatgaactgagc

SEQ ID NO: 1191 - RNA, 20 nt, synthetic construct
  source 1..20: mol_type = other RNA
ggccaggggcctcgggccca

SEQ ID NO: 1192 - RNA, 20 nt, synthetic construct
  source 1..20: mol_type = other RNA
ctggctgggctgggcaggga

SEQ ID NO: 1193 - RNA, 20 nt, synthetic construct
  source 1..20: mol_type = other RNA
atctccgtccagtccagcca

SEQ ID NO: 1194 - RNA, 20 nt, synthetic construct
  source 1..20: mol_type = other RNA
gactgatctccgtccagtcc

SEQ ID NO: 1195 - RNA, 20 nt, synthetic construct
  source 1..20: mol_type = other RNA
ggaaatccctaggagactga

SEQ ID NO: 1196 - RNA, 20 nt, synthetic construct
  source 1..20: mol_type = other RNA
gctgactggctccccaggga

SEQ ID NO: 1197 - RNA, 20 nt, synthetic construct
  source 1..20: mol_type = other RNA
acacccctcccgggcctcca

SEQ ID NO: 1198 - RNA, 20 nt, synthetic construct
  source 1..20: mol_type = other RNA
gctctagcaagtgcttctcc

SEQ ID NO: 1199 - RNA, 20 nt, synthetic construct
  source 1..20: mol_type = other RNA
cttctccaggcttgctggct

SEQ ID NO: 1200 - RNA, 20 nt, synthetic construct
  source 1..20: mol_type = other RNA
ttttatatcatctccagggc

SEQ ID NO: 1201 - RNA, 20 nt, synthetic construct
  source 1..20: mol_type = other RNA
tccagatgcagcaagcgggc

SEQ ID NO: 1202 - RNA, 20 nt, synthetic construct
  source 1..20: mol_type = other RNA
gctccccagggagaggctgg

SEQ ID NO: 1203 - RNA, 20 nt, synthetic construct
  source 1..20: mol_type = other RNA
agtttagaaggctgccaggt

SEQ ID NO: 1204 - RNA, 20 nt, synthetic construct
  source 1..20: mol_type = other RNA
ctgctgctgctgctgctgct

SEQ ID NO: 1205 - RNA, 20 nt, synthetic construct
  source 1..20: mol_type = other RNA
cgttccgaggaggacggcct

SEQ ID NO: 1206 - RNA, 20 nt, synthetic construct
  source 1..20: mol_type = other RNA
aggtcagtgtgcagggtgca

SEQ ID NO: 1207 - RNA, 20 nt, synthetic construct
  source 1..20: mol_type = other RNA
ggcagcgaggagtccacagt

SEQ ID NO: 1208 - RNA, 20 nt, synthetic construct
  source 1..20: mol_type = other RNA
cgaggagctggtgctagcct

SEQ ID NO: 1209 - RNA, 20 nt, synthetic construct
  source 1..20: mol_type = other RNA
gaggagtgagccaggcagtg

SEQ ID NO: 1210 - RNA, 20 nt, synthetic construct
  source 1..20: mol_type = other RNA
gtgctagccttgcgttccga

SEQ ID NO: 1211 - RNA, 20 nt, synthetic construct
  source 1..20: mol_type = other RNA
aagggcagaggccggagggg

SEQ ID NO: 1212 - RNA, 20 nt, synthetic construct
  source 1..20: mol_type = other RNA
gtaaggtcagtgtgcagggt

SEQ ID NO: 1213 - RNA, 20 nt, synthetic construct
  source 1..20: mol_type = other RNA
gagtctggcatcccacgcag

SEQ ID NO: 1214 - RNA, 20 nt, synthetic construct
  source 1..20: mol_type = other RNA
gttgcaggcgggcgccgccg

SEQ ID NO: 1215 - RNA, 20 nt, synthetic construct
  source 1..20: mol_type = other RNA
aacttcagctcctgcacagt

SEQ ID NO: 1216 - RNA, 20 nt, synthetic construct
  source 1..20: mol_type = other RNA
atctgcgcgccccaggcgtc

SEQ ID NO: 1217 - RNA, 20 nt, synthetic construct
  source 1..20: mol_type = other RNA
gggcgccggcctgccttcca

SEQ ID NO: 1218 - RNA, 20 nt, synthetic construct
  source 1..20: mol_type = other RNA
atgtttaatcagataggatc

SEQ ID NO: 1219 - RNA, 20 nt, synthetic construct
  source 1..20: mol_type = other RNA
aggccagtggaaagaattcg

SEQ ID NO: 1220 - RNA, 20 nt, synthetic construct
  source 1..20: mol_type = other RNA
agcctggaggagtgagccag

SEQ ID NO: 1221 - RNA, 20 nt, synthetic construct
  source 1..20: mol_type = other RNA
gccctcatgggcaccgtcag

SEQ ID NO: 1222 - RNA, 20 nt, synthetic construct
  source 1..20: mol_type = other RNA
atctgacgctgtttggggag

SEQ ID NO: 1223 - RNA, 20 nt, synthetic construct
  source 1..20: mol_type = other RNA
ggatttgggagttttttctt

SEQ ID NO: 1224 - RNA, 20 nt, synthetic construct
  source 1..20: mol_type = other RNA
ggatcgtccgatggggctct

SEQ ID NO: 1225 - RNA, 20 nt, synthetic construct
  source 1..20: mol_type = other RNA
gccttgcgttccgaggagga

SEQ ID NO: 1226 - RNA, 20 nt, synthetic construct
  source 1..20: mol_type = other RNA
gttggtaaggtcagtgtgca

SEQ ID NO: 1227 - RNA, 20 nt, synthetic construct
  source 1..20: mol_type = other RNA
ccttccagcccagttaggat

SEQ ID NO: 1228 - RNA, 20 nt, synthetic construct
  source 1..20: mol_type = other RNA
gccgaagcacccgagcacgg

SEQ ID NO: 1229 - RNA, 20 nt, synthetic construct
  source 1..20: mol_type = other RNA
gcgtgatctgcgcgccccag

SEQ ID NO: 1230 - RNA, 20 nt, synthetic construct
  source 1..20: mol_type = other RNA
gtggcgtgatctgcgcgccc

SEQ ID NO: 1231 - RNA, 20 nt, synthetic construct
  source 1..20: mol_type = other RNA
ccactgctgctgctgctgct

SEQ ID NO: 1232 - RNA, 20 nt, synthetic construct
  source 1..20: mol_type = other RNA
ctgctgctgctgctgctcct

SEQ ID NO: 1233 - RNA, 20 nt, synthetic construct
  source 1..20: mol_type = other RNA
aaaaggtgggcccggcagaa

SEQ ID NO: 1234 - RNA, 20 nt, synthetic construct
  source 1..20: mol_type = other RNA
ctcctgggtcccgcgggcgc

SEQ ID NO: 1235 - RNA, 20 nt, synthetic construct
  source 1..20: mol_type = other RNA
tttggggagggcgaggccga

SEQ ID NO: 1236 - RNA, 20 nt, synthetic construct
  source 1..20: mol_type = other RNA
gaaggctgccaggttaaggc

SEQ ID NO: 1237 - RNA, 20 nt, synthetic construct
  source 1..20: mol_type = other RNA
gggagggcgaggccgaaacc

SEQ ID NO: 1238 - RNA, 20 nt, synthetic construct
  source 1..20: mol_type = other RNA
ctgctcctgggtcccgcggg

SEQ ID NO: 1239 - RNA, 20 nt, synthetic construct
  source 1..20: mol_type = other RNA
agccaggcagtgagactggc

SEQ ID NO: 1240 - RNA, 20 nt, synthetic construct
  source 1..20: mol_type = other RNA
atcagataggatcgtccgat

SEQ ID NO: 1241 - RNA, 20 nt, synthetic construct
  source 1..20: mol_type = other RNA
gggctctggtggcgtgatct

SEQ ID NO: 1242 - RNA, 20 nt, synthetic construct
  source 1..20: mol_type = other RNA
ctgctgctgctcctgggtcc

SEQ ID NO: 1243 - RNA, 20 nt, synthetic construct
  source 1..20: mol_type = other RNA
tgcagggtgcataaagggca

SEQ ID NO: 1244 - RNA, 20 nt, synthetic construct
  source 1..20: mol_type = other RNA
attcagaagtctcactggtc

SEQ ID NO: 1245 - RNA, 20 nt, synthetic construct
  source 1..20: mol_type = other RNA
gaaagaattcggtgggcagc

SEQ ID NO: 1246 - RNA, 20 nt, synthetic construct
  source 1..20: mol_type = other RNA
cataaagggcagaggccgga

SEQ ID NO: 1247 - RNA, 20 nt, synthetic construct
  source 1..20: mol_type = other RNA
ggattgattcagaagtctca

SEQ ID NO: 1248 - RNA, 20 nt, synthetic construct
  source 1..20: mol_type = other RNA
gcatcccacgcagggtgaga

SEQ ID NO: 1249 - RNA, 20 nt, synthetic construct
  source 1..20: mol_type = other RNA
cagggtgcataaagggcaga

SEQ ID NO: 1250 - RNA, 20 nt, synthetic construct
  source 1..20: mol_type = other RNA
gtcagcaggagacaaggtgg

SEQ ID NO: 1251 - RNA, 20 nt, synthetic construct
  source 1..20: mol_type = other RNA
gacccaggaaacactgaaaa

SEQ ID NO: 1252 - RNA, 20 nt, synthetic construct
  source 1..20: mol_type = other RNA
agaggcgggagaggaggagc

SEQ ID NO: 1253 - RNA, 20 nt, synthetic construct
  source 1..20: mol_type = other RNA
ggtcccgcgggcgcccgtgc

SEQ ID NO: 1254 - RNA, 20 nt, synthetic construct
  source 1..20: mol_type = other RNA
tttaatcagataggatcgtc

SEQ ID NO: 1255 - RNA, 20 nt, synthetic construct
  source 1..20: mol_type = other RNA
ctagccttgcgttccgagga

SEQ ID NO: 1256 - RNA, 20 nt, synthetic construct
  source 1..20: mol_type = other RNA
cgcgccccaggcgtcaagca

SEQ ID NO: 1257 - RNA, 20 nt, synthetic construct
  source 1..20: mol_type = other RNA
gctcgggcgggccgggacgc

SEQ ID NO: 1258 - RNA, 20 nt, synthetic construct
  source 1..20: mol_type = other RNA
cgcgtaatctgacgctgttt

SEQ ID NO: 1259 - RNA, 20 nt, synthetic construct
  source 1..20: mol_type = other RNA
ggcccggcagaacttggagt

SEQ ID NO: 1260 - RNA, 20 nt, synthetic construct
  source 1..20: mol_type = other RNA
ctgctgctgctgctcctggg

SEQ ID NO: 1261 - RNA, 20 nt, synthetic construct
  source 1..20: mol_type = other RNA
gccgctgccactgctgctgc

SEQ ID NO: 1262 - RNA, 20 nt, synthetic construct
  source 1..20: mol_type = other RNA
ccaggttaaggccagtggaa

SEQ ID NO: 1263 - RNA, 20 nt, synthetic construct
  source 1..20: mol_type = other RNA
agactggctcgggcgggccg

SEQ ID NO: 1264 - RNA, 20 nt, synthetic construct
  source 1..20: mol_type = other RNA
ggagttttttcttccctctg

SEQ ID NO: 1265 - RNA, 20 nt, synthetic construct
  source 1..20: mol_type = other RNA
acgctgtttggggagggcga

SEQ ID NO: 1266 - RNA, 20 nt, synthetic construct
  source 1..20: mol_type = other RNA
ctgctgctcctgggtcccgc

SEQ ID NO: 1267 - RNA, 20 nt, synthetic construct
  source 1..20: mol_type = other RNA
cgcaggaggacgaggacggc

SEQ ID NO: 1268 - RNA, 20 nt, synthetic construct
  source 1..20: mol_type = other RNA
caggcgggcgccgccgttca

SEQ ID NO: 1269 - RNA, 20 nt, synthetic construct
  source 1..20: mol_type = other RNA
ggtctcctcgccaggacagc

SEQ ID NO: 1270 - RNA, 20 nt, synthetic construct
  source 1..20: mol_type = other RNA
cagcagcggctcccagctcc

SEQ ID NO: 1271 - RNA, 20 nt, synthetic construct
  source 1..20: mol_type = other RNA
atcctccagtccgggggttc

SEQ ID NO: 1272 - RNA, 20 nt, synthetic construct
  source 1..20: mol_type = other RNA
gaccgcgcacggcctctagg

SEQ ID NO: 1273 - RNA, 20 nt, synthetic construct
  source 1..20: mol_type = other RNA
gaaggtttccgcagcgacgt

SEQ ID NO: 1274 - RNA, 20 nt, synthetic construct
  source 1..20: mol_type = other RNA
cacagtcctccccaccgcaa

SEQ ID NO: 1275 - RNA, 20 nt, synthetic construct
  source 1..20: mol_type = other RNA
gtggccgctgccactgctgc

SEQ ID NO: 1276 - RNA, 20 nt, synthetic construct
  source 1..20: mol_type = other RNA
ctcctgaacttcagctcctg

SEQ ID NO: 1277 - RNA, 20 nt, synthetic construct
  source 1..20: mol_type = other RNA
ggcaccgtcagctccaggcg

SEQ ID NO: 1278 - RNA, 20 nt, synthetic construct
  source 1..20: mol_type = other RNA
acgcctggggcgcgcagatc

SEQ ID NO: 1279 - RNA, 20 nt, synthetic construct
  source 1..20: mol_type = other RNA
ctgtggactcctcgctgccc

SEQ ID NO: 1280 - RNA, 20 nt, synthetic construct
  source 1..20: mol_type = other RNA
ctcgggtgcttcggccaggc

SEQ ID NO: 1281 - RNA, 20 nt, synthetic construct
  source 1..20: mol_type = other RNA
attaaacattaacggaaccc

SEQ ID NO: 1282 - RNA, 20 nt, synthetic construct
  source 1..20: mol_type = other RNA
aatcaatcctactgtggact

SEQ ID NO: 1283 - RNA, 20 nt, synthetic construct
  source 1..20: mol_type = other RNA
tctgattaaacattaacgga

SEQ ID NO: 1284 - RNA, 20 nt, synthetic construct
  source 1..20: mol_type = other RNA
cccaccgaattctttccact

SEQ ID NO: 1285 - RNA, 20 nt, synthetic construct
  source 1..20: mol_type = other RNA
gctgggagctgggagccgct

SEQ ID NO: 1286 - RNA, 20 nt, synthetic construct
  source 1..20: mol_type = other RNA
tctcctgctgaccagtgaga

SEQ ID NO: 1287 - RNA, 20 nt, synthetic construct
  source 1..20: mol_type = other RNA
cgcgcagagggaagaaaaaa

SEQ ID NO: 1288 - RNA, 20 nt, synthetic construct
  source 1..20: mol_type = other RNA
tgggtgcttgacgcctgggg

SEQ ID NO: 1289 - RNA, 20 nt, synthetic construct
  source 1..20: mol_type = other RNA
ctgtcctggcgaggagacct

SEQ ID NO: 1290 - RNA, 20 nt, synthetic construct
  source 1..20: mol_type = other RNA
aactgaacggcggcgcccgc

SEQ ID NO: 1291 - RNA, 20 nt, synthetic construct
  source 1..20: mol_type = other RNA
ccgggcccaccttttcagtg

SEQ ID NO: 1292 - RNA, 20 nt, synthetic construct
  source 1..20: mol_type = other RNA
gcgcagcggtggaaggtggc

SEQ ID NO: 1293 - RNA, 20 nt, synthetic construct
  source 1..20: mol_type = other RNA
cttcggccaggccgtcctcc

SEQ ID NO: 1294 - RNA, 20 nt, synthetic construct
  source 1..20: mol_type = other RNA
cgtgggatgccagactccaa

SEQ ID NO: 1295 - RNA, 20 nt, synthetic construct
  source 1..20: mol_type = other RNA
cccatgagggccaggggaga

SEQ ID NO: 1296 - RNA, 20 nt, synthetic construct
  source 1..20: mol_type = other RNA
agcgcctcgacgtcgctgcg

SEQ ID NO: 1297 - RNA, 20 nt, synthetic construct
  source 1..20: mol_type = other RNA
ccctttatgcaccctgcaca

SEQ ID NO: 1298 - RNA, 20 nt, synthetic construct
  source 1..20: mol_type = other RNA
actgggctggaaggcaggcc

SEQ ID NO: 1299 - RNA, 20 nt, synthetic construct
  source 1..20: mol_type = other RNA
ggagccgctgctgcaacgac

SEQ ID NO: 1300 - RNA, 20 nt, synthetic construct
  source 1..20: mol_type = other RNA
ggtccaccttgtctcctgct

SEQ ID NO: 1301 - RNA, 20 nt, synthetic construct
  source 1..20: mol_type = other RNA
ggtgcttgacgcctggggcg

SEQ ID NO: 1302 - RNA, 20 nt, synthetic construct
  source 1..20: mol_type = other RNA
cctggctcactcctccaggc

SEQ ID NO: 1303 - RNA, 20 nt, synthetic construct
  source 1..20: mol_type = other RNA
gcgaggagacctagaggccg

SEQ ID NO: 1304 - RNA, 20 nt, synthetic construct
  source 1..20: mol_type = other RNA
gctgtggttccgtgctcggg

SEQ ID NO: 1305 - RNA, 20 nt, synthetic construct
  source 1..20: mol_type = other RNA
cggtggggaggactgtgcag

SEQ ID NO: 1306 - RNA, 20 nt, synthetic construct
  source 1..20: mol_type = other RNA
cacactgaccttaccaacta

SEQ ID NO: 1307 - RNA, 20 nt, synthetic construct
  source 1..20: mol_type = other RNA
tggactcctcgctgcccacc

SEQ ID NO: 1308 - RNA, 20 nt, synthetic construct
  source 1..20: mol_type = other RNA
gctgctccttgaagagattg

SEQ ID NO: 1309 - RNA, 20 nt, synthetic construct
  source 1..20: mol_type = other RNA
cggaaaccttctagggtgtg

SEQ ID NO: 1310 - RNA, 20 nt, synthetic construct
  source 1..20: mol_type = other RNA
aagttcaggagcagggcgcg

SEQ ID NO: 1311 - RNA, 20 nt, synthetic construct
  source 1..20: mol_type = other RNA
ctccttgaagagattgcttg

SEQ ID NO: 1312 - RNA, 20 nt, synthetic construct
  source 1..20: mol_type = other RNA
gaggccgtgcgcggtccacg

SEQ ID NO: 1313 - RNA, 20 nt, synthetic construct
  source 1..20: mol_type = other RNA
ggctggaaggcaggccggcg

SEQ ID NO: 1314 - RNA, 20 nt, synthetic construct
  source 1..20: mol_type = other RNA
ctgaccagtgagacttctga

SEQ ID NO: 1315 - RNA, 20 nt, synthetic construct
  source 1..20: mol_type = other RNA
gcctggaccccctccggcct

SEQ ID NO: 1316 - RNA, 20 nt, synthetic construct
  source 1..20: mol_type = other RNA
ggagctgggagccgctgctg

SEQ ID NO: 1317 - RNA, 20 nt, synthetic construct
  source 1..20: mol_type = other RNA
ggggctcctcctctcccgcc

SEQ ID NO: 1318 - RNA, 20 nt, synthetic construct
  source 1..20: mol_type = other RNA
gcagcggccaccaggaccgc

SEQ ID NO: 1319 - RNA, 20 nt, synthetic construct
  source 1..20: mol_type = other RNA
gcaccagctcctcgtagtcg

SEQ ID NO: 1320 - RNA, 20 nt, synthetic construct
  source 1..20: mol_type = other RNA
gggtgtgggtgcttgacgcc

SEQ ID NO: 1321 - RNA, 20 nt, synthetic construct
  source 1..20: mol_type = other RNA
agggccaggggagaggttgc

SEQ ID NO: 1322 - RNA, 20 nt, synthetic construct
  source 1..20: mol_type = other RNA
acctggcagccttctaaact

SEQ ID NO: 1323 - RNA, 20 nt, synthetic construct
  source 1..20: mol_type = other RNA
tcctggcgaggagacctaga

SEQ ID NO: 1324 - RNA, 20 nt, synthetic construct
  source 1..20: mol_type = other RNA
gggcgcgcagatcacgccac

SEQ ID NO: 1325 - RNA, 20 nt, synthetic construct
  source 1..20: mol_type = other RNA
aacattaacggaacccccgg

SEQ ID NO: 1326 - RNA, 20 nt, synthetic construct
  source 1..20: mol_type = other RNA
acggaacccccggactggag

SEQ ID NO: 1327 - RNA, 20 nt, synthetic construct
  source 1..20: mol_type = other RNA
accttaccaactagctgctc

SEQ ID NO: 1328 - RNA, 20 nt, synthetic construct
  source 1..20: mol_type = other RNA
cgcacgggcgcccgcgggac

SEQ ID NO: 1329 - RNA, 20 nt, synthetic construct
  source 1..20: mol_type = other RNA
ctgcaacgacgcgtcccggc

SEQ ID NO: 1330 - RNA, 20 nt, synthetic construct
  source 1..20: mol_type = other RNA
agccttgcggtggggaggac

SEQ ID NO: 1331 - RNA, 20 nt, synthetic construct
  source 1..20: mol_type = other RNA
gctcactcctccaggctcag

SEQ ID NO: 1332 - RNA, 20 nt, synthetic construct
  source 1..20: mol_type = other RNA
aacggcggcgcccgcctgca

SEQ ID NO: 1333 - RNA, 20 nt, synthetic construct
  source 1..20: mol_type = other RNA
caggagctgaagttcaggag

SEQ ID NO: 1334 - RNA, 20 nt, synthetic construct
  source 1..20: mol_type = other RNA
gttccgtgctcgggtgcttc

SEQ ID NO: 1335 - RNA, 20 nt, synthetic construct
  source 1..20: mol_type = other RNA
acggtgcccatgagggccag

SEQ ID NO: 1336 - RNA, 20 nt, synthetic construct
  source 1..20: mol_type = other RNA
tttcctgggtccaccttgtc

SEQ ID NO: 1337 - RNA, 20 nt, synthetic construct
  source 1..20: mol_type = other RNA
gtcgccgtcctcgtcctcct

SEQ ID NO: 1338 - RNA, 20 nt, synthetic construct
  source 1..20: mol_type = other RNA
gcagccttctaaacttagcc

SEQ ID NO: 1339 - RNA, 20 nt, synthetic construct
  source 1..20: mol_type = other RNA
caaccatgagcgcctcgacg

SEQ ID NO: 1340 - RNA, 20 nt, synthetic construct
  source 1..20: mol_type = other RNA
caacgacgcgtcccggcccg

SEQ ID NO: 1341 - RNA, 20 nt, synthetic construct
  source 1..20: mol_type = other RNA
tggttccgtgctcgggtgct

SEQ ID NO: 1342 - RNA, 20 nt, synthetic construct
  source 1..20: mol_type = other RNA
tgcaccctgcacactgacct

SEQ ID NO: 1343 - RNA, 20 nt, synthetic construct
  source 1..20: mol_type = other RNA
tgcaggagctgaagttcagg

SEQ ID NO: 1344 - RNA, 20 nt, synthetic construct
  source 1..20: mol_type = other RNA
aaggggcgcgcggaatcctg

SEQ ID NO: 1345 - RNA, 20 nt, synthetic construct
  source 1..20: mol_type = other RNA
gaggatcaggtttcggcctc

SEQ ID NO: 1346 - RNA, 20 nt, synthetic construct
  source 1..20: mol_type = other RNA
ggatgccagactccaagttc

SEQ ID NO: 1347 - RNA, 20 nt, synthetic construct
  source 1..20: mol_type = other RNA
gactcctcgctgcccaccga

SEQ ID NO: 1348 - RNA, 20 nt, synthetic construct
  source 1..20: mol_type = other RNA
gagctgacggtgcccatgag

SEQ ID NO: 1349 - RNA, 20 nt, synthetic construct
  source 1..20: mol_type = other RNA
gccttaacctggcagccttc

SEQ ID NO: 1350 - RNA, 20 nt, synthetic construct
  source 1..20: mol_type = other RNA
caccctgcacactgacctta

SEQ ID NO: 1351 - RNA, 20 nt, synthetic construct
  source 1..20: mol_type = other RNA
gggaggactgtgcaggagct

SEQ ID NO: 1352 - RNA, 20 nt, synthetic construct
  source 1..20: mol_type = other RNA
ccagactccaagttctgccg

SEQ ID NO: 1353 - RNA, 20 nt, synthetic construct
  source 1..20: mol_type = other RNA
gaccccctccggcctctgcc

SEQ ID NO: 1354 - RNA, 20 nt, synthetic construct
  source 1..20: mol_type = other RNA
aacttagcctggaccccctc

SEQ ID NO: 1355 - RNA, 20 nt, synthetic construct
  source 1..20: mol_type = other RNA
gaaggcaggccggcgcccta

SEQ ID NO: 1356 - RNA, 20 nt, synthetic construct
  source 1..20: mol_type = other RNA
ccaactagctgctccttgaa

SEQ ID NO: 1357 - RNA, 20 nt, synthetic construct
  source 1..20: mol_type = other RNA
cttgacgcctggggcgcgca

SEQ ID NO: 1358 - RNA, 20 nt, synthetic construct
  source 1..20: mol_type = other RNA
accagtgagacttctgaatc

SEQ ID NO: 1359 - RNA, 20 nt, synthetic construct
  source 1..20: mol_type = other RNA
agacttctgaatcaatccta

SEQ ID NO: 1360 - RNA, 20 nt, synthetic construct
  source 1..20: mol_type = other RNA
cgcggtccacgccggcggcg

SEQ ID NO: 1361 - RNA, 20 nt, synthetic construct
  source 1..20: mol_type = other RNA
gaaggtggctgtggttccgt

SEQ ID NO: 1362 - RNA, 20 nt, synthetic construct
  source 1..20: mol_type = other RNA
tgttagacgatgtaaaaatt

SEQ ID NO: 1363 - RNA, 20 nt, synthetic construct
  source 1..20: mol_type = other RNA
tttccaaaagaactaaagta

SEQ ID NO: 1364 - RNA, 20 nt, synthetic construct
  source 1..20: mol_type = other RNA
ttaagttagttgctcatttc

SEQ ID NO: 1365 - RNA, 20 nt, synthetic construct
  source 1..20: mol_type = other RNA
agaagaactacatataaact

SEQ ID NO: 1366 - RNA, 20 nt, synthetic construct
  source 1..20: mol_type = other RNA
agagccgtaacaccacctga

SEQ ID NO: 1367 - RNA, 20 nt, synthetic construct
  source 1..20: mol_type = other RNA
aaaacaggtagtcaccatag

SEQ ID NO: 1368 - RNA, 20 nt, synthetic construct
  source 1..20: mol_type = other RNA
ggcaaatattggtatatata

SEQ ID NO: 1369 - RNA, 20 nt, synthetic construct
  source 1..20: mol_type = other RNA
tatatagagttaagaagtct

SEQ ID NO: 1370 - RNA, 20 nt, synthetic construct
  source 1..20: mol_type = other RNA
cttccagaagaaaacagttc

SEQ ID NO: 1371 - RNA, 20 nt, synthetic construct
  source 1..20: mol_type = other RNA
tttgatcagtctttttatga

SEQ ID NO: 1372 - RNA, 20 nt, synthetic construct
  source 1..20: mol_type = other RNA
cccaacaaaaaagtttattt

SEQ ID NO: 1373 - RNA, 20 nt, synthetic construct
  source 1..20: mol_type = other RNA
gcattgaatgtgtagtttat

SEQ ID NO: 1374 - RNA, 20 nt, synthetic construct
  source 1..20: mol_type = other RNA
tagtttataatacagcaaag

SEQ ID NO: 1375 - RNA, 20 nt, synthetic construct
  source 1..20: mol_type = other RNA
tccataagacgaagggccaa

SEQ ID NO: 1376 - RNA, 20 nt, synthetic construct
  source 1..20: mol_type = other RNA
gcttttaaaaacaggtagtc

SEQ ID NO: 1377 - RNA, 20 nt, synthetic construct
  source 1..20: mol_type = other RNA
tgtcacttgaactcaactca

SEQ ID NO: 1378 - RNA, 20 nt, synthetic construct
  source 1..20: mol_type = other RNA
aagaatatgtcacttgaact

SEQ ID NO: 1379 - RNA, 20 nt, synthetic construct
  source 1..20: mol_type = other RNA
tgatctatcgctgcaaacca

SEQ ID NO: 1380 - RNA, 20 nt, synthetic construct
  source 1..20: mol_type = other RNA
agggagtggagaaaggcttc

SEQ ID NO: 1381 - RNA, 20 nt, synthetic construct
  source 1..20: mol_type = other RNA
cagtttgagaaatgcatact

SEQ ID NO: 1382 - RNA, 20 nt, synthetic construct
  source 1..20: mol_type = other RNA
caagtcaaaaatgaagaggt

SEQ ID NO: 1383 - RNA, 20 nt, synthetic construct
  source 1..20: mol_type = other RNA
atctatcgctgcaaaccagt

SEQ ID NO: 1384 - RNA, 20 nt, synthetic construct
  source 1..20: mol_type = other RNA
aaatatttagaagagcaact

SEQ ID NO: 1385 - RNA, 20 nt, synthetic construct
  source 1..20: mol_type = other RNA
cagagtaccagaggaacaca

SEQ ID NO: 1386 - RNA, 20 nt, synthetic construct
  source 1..20: mol_type = other RNA
cttgaaattgaaaatcaaga

SEQ ID NO: 1387 - RNA, 20 nt, synthetic construct
  source 1..20: mol_type = other RNA
ccagaggaacacagcattga

SEQ ID NO: 1388 - RNA, 20 nt, synthetic construct
  source 1..20: mol_type = other RNA
gagttaagaagtctaggtct

SEQ ID NO: 1389 - RNA, 20 nt, synthetic construct
  source 1..20: mol_type = other RNA
gaagaaaaaattctacttca

SEQ ID NO: 1390 - RNA, 20 nt, synthetic construct
  source 1..20: mol_type = other RNA
gatcactgtttccaaaagaa

SEQ ID NO: 1391 - RNA, 20 nt, synthetic construct
  source 1..20: mol_type = other RNA
tttcctccagaattgatcaa

SEQ ID NO: 1392 - RNA, 20 nt, synthetic construct
  source 1..20: mol_type = other RNA
agctccttctttttattgtt

SEQ ID NO: 1393 - RNA, 20 nt, synthetic construct
  source 1..20: mol_type = other RNA
taaactacaagtcaaaaatg

SEQ ID NO: 1394 - RNA, 20 nt, synthetic construct
  source 1..20: mol_type = other RNA
aaaatgttcacaattaagct

SEQ ID NO: 1395 - RNA, 20 nt, synthetic construct
  source 1..20: mol_type = other RNA
aagaggtaaagaatatgtca

SEQ ID NO: 1396 - RNA, 20 nt, synthetic construct
  source 1..20: mol_type = other RNA
tcacttgaactcaactcaaa

SEQ ID NO: 1397 - RNA, 20 nt, synthetic construct
  source 1..20: mol_type = other RNA
gaagaaggttacattcgtgc

SEQ ID NO: 1398 - RNA, 20 nt, synthetic construct
  source 1..20: mol_type = other RNA
tcgctgcaaaccagtgaaat

SEQ ID NO: 1399 - RNA, 20 nt, synthetic construct
  source 1..20: mol_type = other RNA
gtatatatagagttaagaag

SEQ ID NO: 1400 - RNA, 20 nt, synthetic construct
  source 1..20: mol_type = other RNA
atcaagacaattcatcattt

SEQ ID NO: 1401 - RNA, 20 nt, synthetic construct
  source 1..20: mol_type = other RNA
gcctccttcagttgggacat

SEQ ID NO: 1402 - RNA, 20 nt, synthetic construct
  source 1..20: mol_type = other RNA
tggaagaaggttacattcgt

SEQ ID NO: 1403 - RNA, 20 nt, synthetic construct
  source 1..20: mol_type = other RNA
gccaatggcctccttcagtt

SEQ ID NO: 1404 - RNA, 20 nt, synthetic construct
  source 1..20: mol_type = other RNA
caaaccagtgaaatcaaaga

SEQ ID NO: 1405 - RNA, 20 nt, synthetic construct
  source 1..20: mol_type = other RNA
cttttttcccctcaacttta

SEQ ID NO: 1406 - RNA, 20 nt, synthetic construct
  source 1..20: mol_type = other RNA
actcaatgtggaagaaggtt

SEQ ID NO: 1407 - RNA, 20 nt, synthetic construct
  source 1..20: mol_type = other RNA
atgattaactatgttcacct

SEQ ID NO: 1408 - RNA, 20 nt, synthetic construct
  source 1..20: mol_type = other RNA
gaagagcaactaactaactt

SEQ ID NO: 1409 - RNA, 20 nt, synthetic construct
  source 1..20: mol_type = other RNA
atctaactcaatgtggaaga

SEQ ID NO: 1410 - RNA, 20 nt, synthetic construct
  source 1..20: mol_type = other RNA
tagagttaagaagtctaggt

SEQ ID NO: 1411 - RNA, 20 nt, synthetic construct
  source 1..20: mol_type = other RNA
atttcatttagcattgatct

SEQ ID NO: 1412 - RNA, 20 nt, synthetic construct
  source 1..20: mol_type = other RNA
aaaattttagccaatggcct

SEQ ID NO: 1413 - RNA, 20 nt, synthetic construct
  source 1..20: mol_type = other RNA
attaactatgttcacctacc

SEQ ID NO: 1414 - RNA, 20 nt, synthetic construct
  source 1..20: mol_type = other RNA
ttcacctaccaaccttacct

SEQ ID NO: 1415 - RNA, 20 nt, synthetic construct
  source 1..20: mol_type = other RNA
tgtagtttataatacagcaa

SEQ ID NO: 1416 - RNA, 20 nt, synthetic construct
  source 1..20: mol_type = other RNA
ctcatttctttgatttcatt

SEQ ID NO: 1417 - RNA, 20 nt, synthetic construct
  source 1..20: mol_type = other RNA
ccttttctgggcaaatattg

SEQ ID NO: 1418 - RNA, 20 nt, synthetic construct
  source 1..20: mol_type = other RNA
cctattaagttagttgctca

SEQ ID NO: 1419 - RNA, 20 nt, synthetic construct
  source 1..20: mol_type = other RNA
tgttcacctaccaaccttac

SEQ ID NO: 1420 - RNA, 20 nt, synthetic construct
  source 1..20: mol_type = other RNA
gagaaaggcttcagagagaa

SEQ ID NO: 1421 - RNA, 20 nt, synthetic construct
  source 1..20: mol_type = other RNA
ttggtatatatagagttaag

SEQ ID NO: 1422 - RNA, 20 nt, synthetic construct
  source 1..20: mol_type = other RNA
ggtctgcttccagaagaaaa

SEQ ID NO: 1423 - RNA, 20 nt, synthetic construct
  source 1..20: mol_type = other RNA
gtttataatacagcaaagtt

SEQ ID NO: 1424 - RNA, 20 nt, synthetic construct
  source 1..20: mol_type = other RNA
ggacatggtcttaaagactt

SEQ ID NO: 1425 - RNA, 20 nt, synthetic construct
  source 1..20: mol_type = other RNA
gttgctcatttctttgattt

SEQ ID NO: 1426 - RNA, 20 nt, synthetic construct
  source 1..20: mol_type = other RNA
tctccagagccaaaatcaag

SEQ ID NO: 1427 - RNA, 20 nt, synthetic construct
  source 1..20: mol_type = other RNA
aactcaactcaaaacttgaa

SEQ ID NO: 1428 - RNA, 20 nt, synthetic construct
  source 1..20: mol_type = other RNA
aaagcctcctagaagaaaaa

SEQ ID NO: 1429 - RNA, 20 nt, synthetic construct
  source 1..20: mol_type = other RNA
caagttaacacggcttaatg

SEQ ID NO: 1430 - RNA, 20 nt, synthetic construct
  source 1..20: mol_type = other RNA
gacgatgtaaaaattttagc

SEQ ID NO: 1431 - RNA, 20 nt, synthetic construct
  source 1..20: mol_type = other RNA
ttgttcctctagttatttcc

SEQ ID NO: 1432 - RNA, 20 nt, synthetic construct
  source 1..20: mol_type = other RNA
agaaatgcatacttaattca

SEQ ID NO: 1433 - RNA, 20 nt, synthetic construct
  source 1..20: mol_type = other RNA
ttcctctagttatttcctcc

SEQ ID NO: 1434 - RNA, 20 nt, synthetic construct
  source 1..20: mol_type = other RNA
agacgaagggccaaattaat

SEQ ID NO: 1435 - RNA, 20 nt, synthetic construct
  source 1..20: mol_type = other RNA
atgacatatttcaaaaactc

SEQ ID NO: 1436 - RNA, 20 nt, synthetic construct
  source 1..20: mol_type = other RNA
cattcgtgcaagttaacacg

SEQ ID NO: 1437 - RNA, 20 nt, synthetic construct
  source 1..20: mol_type = other RNA
taaaaattttagccaatggc

SEQ ID NO: 1438 - RNA, 20 nt, synthetic construct
  source 1..20: mol_type = other RNA
tttttgacttgtaaatctct

SEQ ID NO: 1439 - RNA, 20 nt, synthetic construct
  source 1..20: mol_type = other RNA
aaatcaaagaagaagaaaag

SEQ ID NO: 1440 - RNA, 20 nt, synthetic construct
  source 1..20: mol_type = other RNA
gcattgatctaactcaatgt

SEQ ID NO: 1441 - RNA, 20 nt, synthetic construct
  source 1..20: mol_type = other RNA
ttcacaattaagctccttct

SEQ ID NO: 1442 - RNA, 20 nt, synthetic construct
  source 1..20: mol_type = other RNA
agttagttgctcatttcttt

SEQ ID NO: 1443 - RNA, 20 nt, synthetic construct
  source 1..20: mol_type = other RNA
acatatttcaaaaactcaac

SEQ ID NO: 1444 - RNA, 20 nt, synthetic construct
  source 1..20: mol_type = other RNA
gaatggatcactgtttccaa

SEQ ID NO: 1445 - RNA, 20 nt, synthetic construct
  source 1..20: mol_type = other RNA
acaccacctgagggagtgga

SEQ ID NO: 1446 - RNA, 20 nt, synthetic construct
  source 1..20: mol_type = other RNA
ttttttggaatggatcactg

SEQ ID NO: 1447 - RNA, 20 nt, synthetic construct
  source 1..20: mol_type = other RNA
aagactttgtccataagacg

SEQ ID NO: 1448 - RNA, 20 nt, synthetic construct
  source 1..20: mol_type = other RNA
tatagagttaagaagtctag

SEQ ID NO: 1449 - RNA, 20 nt, synthetic construct
  source 1..20: mol_type = other RNA
gtcaccatagcattgaatgt

SEQ ID NO: 1450 - RNA, 20 nt, synthetic construct
  source 1..20: mol_type = other RNA
cttcaacaaaaagtgaaata

SEQ ID NO: 1451 - RNA, 20 nt, synthetic construct
  source 1..20: mol_type = other RNA
ctatgttagacgatgtaaaa

SEQ ID NO: 1452 - RNA, 20 nt, synthetic construct
  source 1..20: mol_type = other RNA
attctctatctccagagcca

SEQ ID NO: 1453 - RNA, 20 nt, synthetic construct
  source 1..20: mol_type = other RNA
tttagaagagcaactaacta

SEQ ID NO: 1454 - RNA, 20 nt, synthetic construct
  source 1..20: mol_type = other RNA
aatttacccaacaaaaaagt

SEQ ID NO: 1455 - RNA, 20 nt, synthetic construct
  source 1..20: mol_type = other RNA
attcattacttttttcccct

SEQ ID NO: 1456 - RNA, 20 nt, synthetic construct
  source 1..20: mol_type = other RNA
aactacaagtcaaaaatgaa

SEQ ID NO: 1457 - RNA, 20 nt, synthetic construct
  source 1..20: mol_type = other RNA
gttatttcctccagaattga

SEQ ID NO: 1458 - RNA, 20 nt, synthetic construct
  source 1..20: mol_type = other RNA
acacggcttaatgattaact

SEQ ID NO: 1459 - RNA, 20 nt, synthetic construct
  source 1..20: mol_type = other RNA
actatgttcacctaccaacc

SEQ ID NO: 1460 - RNA, 20 nt, synthetic construct
  source 1..20: mol_type = other RNA
gtcttaaagactttgtccat

SEQ ID NO: 1461 - RNA, 20 nt, synthetic construct
  source 1..20: mol_type = other RNA
atacagcaaagttaaataca

SEQ ID NO: 1462 - RNA, 20 nt, synthetic construct
  source 1..20: mol_type = other RNA
ccaaccttaccttttctggg

SEQ ID NO: 1463 - RNA, 20 nt, synthetic construct
  source 1..20: mol_type = other RNA
aagtacagtttgagaaatgc

SEQ ID NO: 1464 - RNA, 20 nt, synthetic construct
  source 1..20: mol_type = other RNA
atcagtctttttatgatcta

SEQ ID NO: 1465 - RNA, 20 nt, synthetic construct
  source 1..20: mol_type = other RNA
agaagtctaggtctgcttcc

SEQ ID NO: 1466 - RNA, 20 nt, synthetic construct
  source 1..20: mol_type = other RNA
cagcaaagttaaatacaatt

SEQ ID NO: 1467 - RNA, 20 nt, synthetic construct
  source 1..20: mol_type = other RNA
catataaactacaagtcaaa

SEQ ID NO: 1468 - RNA, 20 nt, synthetic construct
  source 1..20: mol_type = other RNA
agaccatgtcccaactgaag

SEQ ID NO: 1469 - RNA, 20 nt, synthetic construct
  source 1..20: mol_type = other RNA
aaaagactgatcaaatatgt

SEQ ID NO: 1470 - RNA, 20 nt, synthetic construct
  source 1..20: mol_type = other RNA
catcgtctaacatagcaaat

SEQ ID NO: 1471 - RNA, 20 nt, synthetic construct
  source 1..20: mol_type = other RNA
gtaggtgaacatagttaatc

SEQ ID NO: 1472 - RNA, 20 nt, synthetic construct
  source 1..20: mol_type = other RNA
ttttcttctggaagcagacc

SEQ ID NO: 1473 - RNA, 20 nt, synthetic construct
  source 1..20: mol_type = other RNA
cctgtttttaaaagctaatt

SEQ ID NO: 1474 - RNA, 20 nt, synthetic construct
  source 1..20: mol_type = other RNA
gaggaacaataaaaagaagg

SEQ ID NO: 1475 - RNA, 20 nt, synthetic construct
  source 1..20: mol_type = other RNA
tgtagttcttctcagttcct

SEQ ID NO: 1476 - RNA, 20 nt, synthetic construct
  source 1..20: mol_type = other RNA
tactttagttcttttggaaa

SEQ ID NO: 1477 - RNA, 20 nt, synthetic construct
  source 1..20: mol_type = other RNA
gatcataaaaagactgatca

SEQ ID NO: 1478 - RNA, 20 nt, synthetic construct
  source 1..20: mol_type = other RNA
acatagcaaatcttgatttt

SEQ ID NO: 1479 - RNA, 20 nt, synthetic construct
  source 1..20: mol_type = other RNA
ctgtgttcctctggtactct

SEQ ID NO: 1480 - RNA, 20 nt, synthetic construct
  source 1..20: mol_type = other RNA
gagaatcaaatgatgaattg

SEQ ID NO: 1481 - RNA, 20 nt, synthetic construct
  source 1..20: mol_type = other RNA
agtatgcatttctcaaactg

SEQ ID NO: 1482 - RNA, 20 nt, synthetic construct
  source 1..20: mol_type = other RNA
tgttgagtttttgaaatatg

SEQ ID NO: 1483 - RNA, 20 nt, synthetic construct
  source 1..20: mol_type = other RNA
tgttcctctggtactctgta

SEQ ID NO: 1484 - RNA, 20 nt, synthetic construct
  source 1..20: mol_type = other RNA
acatattctttacctcttca

SEQ ID NO: 1485 - RNA, 20 nt, synthetic construct
  source 1..20: mol_type = other RNA
ttaaagttgaggggaaaaaa

SEQ ID NO: 1486 - RNA, 20 nt, synthetic construct
  source 1..20: mol_type = other RNA
aggggaaaaaagtaatgaat

SEQ ID NO: 1487 - RNA, 20 nt, synthetic construct
  source 1..20: mol_type = other RNA
aaggaggccattggctaaaa

SEQ ID NO: 1488 - RNA, 20 nt, synthetic construct
  source 1..20: mol_type = other RNA
gtttatatgtagttcttctc

SEQ ID NO: 1489 - RNA, 20 nt, synthetic construct
  source 1..20: mol_type = other RNA
aaaagaaggagcttaattgt

SEQ ID NO: 1490 - RNA, 20 nt, synthetic construct
  source 1..20: mol_type = other RNA
tgtcattaatttggcccttc

SEQ ID NO: 1491 - RNA, 20 nt, synthetic construct
  source 1..20: mol_type = other RNA
gaaacagtgatccattccaa

SEQ ID NO: 1492 - RNA, 20 nt, synthetic construct
  source 1..20: mol_type = other RNA
ctgtattataaactacacat

SEQ ID NO: 1493 - RNA, 20 nt, synthetic construct
  source 1..20: mol_type = other RNA
ttgagtttttgaaatatgtc

SEQ ID NO: 1494 - RNA, 20 nt, synthetic construct
  source 1..20: mol_type = other RNA
actttgctgtattataaact

SEQ ID NO: 1495 - RNA, 20 nt, synthetic construct
  source 1..20: mol_type = other RNA
taaactacacattcaatgct

SEQ ID NO: 1496 - RNA, 20 nt, synthetic construct
  source 1..20: mol_type = other RNA
taaccttcttccacattgag

SEQ ID NO: 1497 - RNA, 20 nt, synthetic construct
  source 1..20: mol_type = other RNA
gagatagagaatcaaatgat

SEQ ID NO: 1498 - RNA, 20 nt, synthetic construct
  source 1..20: mol_type = other RNA
acttgcacgaatgtaacctt

SEQ ID NO: 1499 - RNA, 20 nt, synthetic construct
  source 1..20: mol_type = other RNA
agccgtgttaacttgcacga

SEQ ID NO: 1500 - RNA, 20 nt, synthetic construct
  source 1..20: mol_type = other RNA
aactacacattcaatgctat

SEQ ID NO: 1501 - RNA, 20 nt, synthetic construct
  source 1..20: mol_type = other RNA
ctatggtgactacctgtttt

SEQ ID NO: 1502 - RNA, 20 nt, synthetic construct
  source 1..20: mol_type = other RNA
gttaatcattaagccgtgtt

SEQ ID NO: 1503 - RNA, 20 nt, synthetic construct
  source 1..20: mol_type = other RNA
atttcactggtttgcagcga

SEQ ID NO: 1504 - RNA, 20 nt, synthetic construct
  source 1..20: mol_type = other RNA
gcccttcgtcttatggacaa

SEQ ID NO: 1505 - RNA, 20 nt, synthetic construct
  source 1..20: mol_type = other RNA
actagaggaacaataaaaag

SEQ ID NO: 1506 - RNA, 20 nt, synthetic construct
  source 1..20: mol_type = other RNA
gacttcttaactctatatat

SEQ ID NO: 1507 - RNA, 20 nt, synthetic construct
  source 1..20: mol_type = other RNA
atgaattaagtatgcatttc

SEQ ID NO: 1508 - RNA, 20 nt, synthetic construct
  source 1..20: mol_type = other RNA
tagttcttctcagttccttt

SEQ ID NO: 1509 - RNA, 20 nt, synthetic construct
  source 1..20: mol_type = other RNA
gaagcagacctagacttctt

SEQ ID NO: 1510 - RNA, 20 nt, synthetic construct
  source 1..20: mol_type = other RNA
ggaggctttcaagttttgag

SEQ ID NO: 1511 - RNA, 20 nt, synthetic construct
  source 1..20: mol_type = other RNA
accttcttccacattgagtt

SEQ ID NO: 1512 - RNA, 20 nt, synthetic construct
  source 1..20: mol_type = other RNA
gaactgttttcttctggaag

SEQ ID NO: 1513 - RNA, 20 nt, synthetic construct
  source 1..20: mol_type = other RNA
aaatttttacatcgtctaac

SEQ ID NO: 1514 - RNA, 20 nt, synthetic construct
  source 1..20: mol_type = other RNA
agttcaagtgacatattctt

SEQ ID NO: 1515 - RNA, 20 nt, synthetic construct
  source 1..20: mol_type = other RNA
gtgttacggctctcaatgct

SEQ ID NO: 1516 - RNA, 20 nt, synthetic construct
  source 1..20: mol_type = other RNA
acttgtagtttatatgtagt

SEQ ID NO: 1517 - RNA, 20 nt, synthetic construct
  source 1..20: mol_type = other RNA
tagtttatatgtagttcttc

SEQ ID NO: 1518 - RNA, 20 nt, synthetic construct
  source 1..20: mol_type = other RNA
ttaacttgcacgaatgtaac

SEQ ID NO: 1519 - RNA, 20 nt, synthetic construct
  source 1..20: mol_type = other RNA
aagcctttctccactccctc

SEQ ID NO: 1520 - RNA, 20 nt, synthetic construct
  source 1..20: mol_type = other RNA
gatcaatgctaaatgaaatc

SEQ ID NO: 1521 - RNA, 20 nt, synthetic construct
  source 1..20: mol_type = other RNA
tggacaaagtctttaagacc

SEQ ID NO: 1522 - RNA, 20 nt, synthetic construct
  source 1..20: mol_type = other RNA
aacttttttgttgggtaaat

SEQ ID NO: 1523 - RNA, 20 nt, synthetic construct
  source 1..20: mol_type = other RNA
cctcttcatttttgacttgt

SEQ ID NO: 1524 - RNA, 20 nt, synthetic construct
  source 1..20: mol_type = other RNA
agagatttacaagtcaaaaa

SEQ ID NO: 1525 - RNA, 20 nt, synthetic construct
  source 1..20: mol_type = other RNA
ttacggctctcaatgctgtg

SEQ ID NO: 1526 - RNA, 20 nt, synthetic construct
  source 1..20: mol_type = other RNA
cccagaaaaggtaaggttgg

SEQ ID NO: 1527 - RNA, 20 nt, synthetic construct
  source 1..20: mol_type = other RNA
tcttgattttcaatttcaag

SEQ ID NO: 1528 - RNA, 20 nt, synthetic construct
  source 1..20: mol_type = other RNA
cagcgatagatcataaaaag

SEQ ID NO: 1529 - RNA, 20 nt, synthetic construct
  source 1..20: mol_type = other RNA
cacgaatgtaaccttcttcc

SEQ ID NO: 1530 - RNA, 20 nt, synthetic construct
  source 1..20: mol_type = other RNA
agttagatcaatgctaaatg

SEQ ID NO: 1531 - RNA, 20 nt, synthetic construct
  source 1..20: mol_type = other RNA
gttagttgctcttctaaata

SEQ ID NO: 1532 - RNA, 20 nt, synthetic construct
  source 1..20: mol_type = other RNA
tttcactttttgttgaagta

SEQ ID NO: 1533 - RNA, 20 nt, synthetic construct
  source 1..20: mol_type = other RNA
tatataccaatatttgccca

SEQ ID NO: 1534 - RNA, 20 nt, synthetic construct
  source 1..20: mol_type = other RNA
tatgtagttcttctcagttc

SEQ ID NO: 1535 - RNA, 20 nt, synthetic construct
  source 1..20: mol_type = other RNA
gacaaagtctttaagaccat

SEQ ID NO: 1536 - RNA, 20 nt, synthetic construct
  source 1..20: mol_type = other RNA
tggtgactacctgtttttaa

SEQ ID NO: 1537 - RNA, 20 nt, synthetic construct
  source 1..20: mol_type = other RNA
aatgaaatcaaagaaatgag

SEQ ID NO: 1538 - RNA, 20 nt, synthetic construct
  source 1..20: mol_type = other RNA
gttgctcttctaaatatttc

SEQ ID NO: 1539 - RNA, 20 nt, synthetic construct
  source 1..20: mol_type = other RNA
cggctctcaatgctgtgttc

SEQ ID NO: 1540 - RNA, 20 nt, synthetic construct
  source 1..20: mol_type = other RNA
tcttgatcaattctggagga

SEQ ID NO: 1541 - RNA, 20 nt, synthetic construct
  source 1..20: mol_type = other RNA
ctcttctaaatatttcactt

SEQ ID NO: 1542 - RNA, 20 nt, synthetic construct
  source 1..20: mol_type = other RNA
gctaaaatttttacatcgtc

SEQ ID NO: 1543 - RNA, 20 nt, synthetic construct
  source 1..20: mol_type = other RNA
aattaagttagttagttgct

SEQ ID NO: 1544 - RNA, 20 nt, synthetic construct
  source 1..20: mol_type = other RNA
attttcaatttcaagcaacg

SEQ ID NO: 1545 - RNA, 20 nt, synthetic construct
  source 1..20: mol_type = other RNA
atcattaagccgtgttaact

SEQ ID NO: 1546 - RNA, 20 nt, synthetic construct
  source 1..20: mol_type = other RNA
agttagttagttgctcttct

SEQ ID NO: 1547 - RNA, 20 nt, synthetic construct
  source 1..20: mol_type = other RNA
gctctggagatagagaatca

SEQ ID NO: 1548 - RNA, 20 nt, synthetic construct
  source 1..20: mol_type = other RNA
gaggaaataactagaggaac

SEQ ID NO: 1549 - RNA, 20 nt, synthetic construct
  source 1..20: mol_type = other RNA
aagttgaggggaaaaaagta

SEQ ID NO: 1550 - RNA, 20 nt, synthetic construct
  source 1..20: mol_type = other RNA
tttgcccagaaaaggtaagg

SEQ ID NO: 1551 - RNA, 20 nt, synthetic construct
  source 1..20: mol_type = other RNA
atccattccaaaaaacactt

SEQ ID NO: 1552 - RNA, 20 nt, synthetic construct
  source 1..20: mol_type = other RNA
ttattaaagttgaggggaaa

SEQ ID NO: 1553 - RNA, 20 nt, synthetic construct
  source 1..20: mol_type = other RNA
atgaattgtcttgatcaatt

SEQ ID NO: 1554 - RNA, 20 nt, synthetic construct
  source 1..20: mol_type = other RNA
ctttagttcttttggaaaca

SEQ ID NO: 1555 - RNA, 20 nt, synthetic construct
  source 1..20: mol_type = other RNA
tgcatttctcaaactgtact

SEQ ID NO: 1556 - RNA, 20 nt, synthetic construct
  source 1..20: mol_type = other RNA
aattaagtatgcatttctca

SEQ ID NO: 1557 - RNA, 20 nt, synthetic construct
  source 1..20: mol_type = other RNA
tcattaatttggcccttcgt

SEQ ID NO: 1558 - RNA, 20 nt, synthetic construct
  source 1..20: mol_type = other RNA
atttggcccttcgtcttatg

SEQ ID NO: 1559 - RNA, 20 nt, synthetic construct
  source 1..20: mol_type = other RNA
taccaatatttgcccagaaa

SEQ ID NO: 1560 - RNA, 20 nt, synthetic construct
  source 1..20: mol_type = other RNA
agttgagttcaagtgacata

SEQ ID NO: 1561 - RNA, 20 nt, synthetic construct
  source 1..20: mol_type = other RNA
gtgactacctgtttttaaaa

SEQ ID NO: 1562 - RNA, 20 nt, synthetic construct
  source 1..20: mol_type = other RNA
actacctgtttttaaaagct

SEQ ID NO: 1563 - RNA, 20 nt, synthetic construct
  source 1..20: mol_type = other RNA
catttctcaaactgtacttt

SEQ ID NO: 1564 - RNA, 20 nt, synthetic construct
  source 1..20: mol_type = other RNA
gcaaatcttgattttggctc

SEQ ID NO: 1565 - RNA, 20 nt, synthetic construct
  source 1..20: mol_type = other RNA
aggttggtaggtgaacatag

SEQ ID NO: 1566 - RNA, 20 nt, synthetic construct
  source 1..20: mol_type = other RNA
gttcttctcagttccttttc

SEQ ID NO: 1567 - RNA, 20 nt, synthetic construct
  source 1..20: mol_type = other RNA
aacatagttaatcattaagc

SEQ ID NO: 1568 - RNA, 20 nt, synthetic construct
  source 1..20: mol_type = other RNA
aaatatgtcattaatttggc

SEQ ID NO: 1569 - RNA, 20 nt, synthetic construct
  source 1..20: mol_type = other RNA
agcaactaacttaataggta

SEQ ID NO: 1570 - RNA, 20 nt, synthetic construct
  source 1..20: mol_type = other RNA
cacattcaatgctatggtga

SEQ ID NO: 1571 - RNA, 20 nt, synthetic construct
  source 1..20: mol_type = other RNA
atcaattctggaggaaataa

SEQ ID NO: 1572 - RNA, 20 nt, synthetic construct
  source 1..20: mol_type = other RNA
ttctttacctcttcattttt

SEQ ID NO: 1573 - RNA, 20 nt, synthetic construct
  source 1..20: mol_type = other RNA
aaatcaaagaaatgagcaac

SEQ ID NO: 1574 - RNA, 20 nt, synthetic construct
  source 1..20: mol_type = other RNA
aattgtcttgatcaattctg

SEQ ID NO: 1575 - RNA, 20 nt, synthetic construct
  source 1..20: mol_type = other RNA
tataccaatatttgcccaga

SEQ ID NO: 1576 - RNA, 20 nt, synthetic construct
  source 1..20: mol_type = other RNA
ggtgaacatagttaatcatt

SEQ ID NO: 1577 - RNA, 20 nt, synthetic construct
  source 1..20: mol_type = other RNA
attttggctctggagataga

SEQ ID NO: 1578 - RNA, 20 nt, synthetic construct
  source 1..20: mol_type = other RNA
tcccaactgaaggaggccat

SEQ ID NO: 1579 - RNA, 20 nt, synthetic construct
  source 1..20: mol_type = other RNA
gtttgcagcgatagatcata

SEQ ID NO: 1580 - RNA, 20 nt, synthetic construct
  source 1..20: mol_type = other RNA
ccaatatttgcccagaaaag

SEQ ID NO: 1581 - RNA, 20 nt, synthetic construct
  source 1..20: mol_type = other RNA
gttcttttggaaacagtgat

SEQ ID NO: 1582 - RNA, 20 nt, synthetic construct
  source 1..20: mol_type = other RNA
gaattttttcttctaggagg

SEQ ID NO: 1583 - RNA, 20 nt, synthetic construct
  source 1..20: mol_type = other RNA
acaggctccttcacagaagc

SEQ ID NO: 1584 - RNA, 20 nt, synthetic construct
  source 1..20: mol_type = other RNA
ctctgcagaacgggacatct

SEQ ID NO: 1585 - RNA, 20 nt, synthetic construct
  source 1..20: mol_type = other RNA
gccccccccacaccaggaac

SEQ ID NO: 1586 - RNA, 20 nt, synthetic construct
  source 1..20: mol_type = other RNA
atatgctgagaaacaatagg

SEQ ID NO: 1587 - RNA, 20 nt, synthetic construct
  source 1..20: mol_type = other RNA
ggcagggattagtgagagaa

SEQ ID NO: 1588 - RNA, 20 nt, synthetic construct
  source 1..20: mol_type = other RNA
gacctcaggcctgctttaca

SEQ ID NO: 1589 - RNA, 20 nt, synthetic construct
  source 1..20: mol_type = other RNA
cagaacgggacatctactct

SEQ ID NO: 1590 - RNA, 20 nt, synthetic construct
  source 1..20: mol_type = other RNA
gagtagctagctgcttctag

SEQ ID NO: 1591 - RNA, 20 nt, synthetic construct
  source 1..20: mol_type = other RNA
gtgccactgtggagcaacgg

SEQ ID NO: 1592 - RNA, 20 nt, synthetic construct
  source 1..20: mol_type = other RNA
gggaatctgtggtgccactg

SEQ ID NO: 1593 - RNA, 20 nt, synthetic construct
  source 1..20: mol_type = other RNA
gtgagagcttctccctccag

SEQ ID NO: 1594 - RNA, 20 nt, synthetic construct
  source 1..20: mol_type = other RNA
gctccaggatgggacagcgg

SEQ ID NO: 1595 - RNA, 20 nt, synthetic construct
  source 1..20: mol_type = other RNA
ctgagaaacaataggtttct

SEQ ID NO: 1596 - RNA, 20 nt, synthetic construct
  source 1..20: mol_type = other RNA
acctgttttatattggctcc

SEQ ID NO: 1597 - RNA, 20 nt, synthetic construct
  source 1..20: mol_type = other RNA
agattgcccatgcttttcac

SEQ ID NO: 1598 - RNA, 20 nt, synthetic construct
  source 1..20: mol_type = other RNA
gggtggaaggtggagtatag

SEQ ID NO: 1599 - RNA, 20 nt, synthetic construct
  source 1..20: mol_type = other RNA
ccaaaggcttctaatagctc

SEQ ID NO: 1600 - RNA, 20 nt, synthetic construct
  source 1..20: mol_type = other RNA
agacaggaaaagacagggga

SEQ ID NO: 1601 - RNA, 20 nt, synthetic construct
  source 1..20: mol_type = other RNA
gacccagccccccaagtggg

SEQ ID NO: 1602 - RNA, 20 nt, synthetic construct
  source 1..20: mol_type = other RNA
ccgtagctgggcagggatta

SEQ ID NO: 1603 - RNA, 20 nt, synthetic construct
  source 1..20: mol_type = other RNA
cagtagacccagccccccaa

SEQ ID NO: 1604 - RNA, 20 nt, synthetic construct
  source 1..20: mol_type = other RNA
ggtggtgagagcttctccct

SEQ ID NO: 1605 - RNA, 20 nt, synthetic construct
  source 1..20: mol_type = other RNA
gaatggaatggggaatctgt

SEQ ID NO: 1606 - RNA, 20 nt, synthetic construct
  source 1..20: mol_type = other RNA
gatggctgggtggtgagagc

SEQ ID NO: 1607 - RNA, 20 nt, synthetic construct
  source 1..20: mol_type = other RNA
tggagcaacggaggaagtgg

SEQ ID NO: 1608 - RNA, 20 nt, synthetic construct
  source 1..20: mol_type = other RNA
gcctccctttccccagcttc

SEQ ID NO: 1609 - RNA, 20 nt, synthetic construct
  source 1..20: mol_type = other RNA
ggtcatgaatcccaagcctt

SEQ ID NO: 1610 - RNA, 20 nt, synthetic construct
  source 1..20: mol_type = other RNA
gctagctgcttctagggata

SEQ ID NO: 1611 - RNA, 20 nt, synthetic construct
  source 1..20: mol_type = other RNA
gcccatagcctccctttccc

SEQ ID NO: 1612 - RNA, 20 nt, synthetic construct
  source 1..20: mol_type = other RNA
gagaccatgagtcccaagcc

SEQ ID NO: 1613 - RNA, 20 nt, synthetic construct
  source 1..20: mol_type = other RNA
tgacctgttttatattggct

SEQ ID NO: 1614 - RNA, 20 nt, synthetic construct
  source 1..20: mol_type = other RNA
ctctaatatgctgagaaaca

SEQ ID NO: 1615 - RNA, 20 nt, synthetic construct
  source 1..20: mol_type = other RNA
ccactgtggagcaacggagg

SEQ ID NO: 1616 - RNA, 20 nt, synthetic construct
  source 1..20: mol_type = other RNA
acctccacctgtgatcccaa

SEQ ID NO: 1617 - RNA, 20 nt, synthetic construct
  source 1..20: mol_type = other RNA
ctttacagcctagagccagt

SEQ ID NO: 1618 - RNA, 20 nt, synthetic construct
  source 1..20: mol_type = other RNA
ctgagcagtccagaccagag

SEQ ID NO: 1619 - RNA, 20 nt, synthetic construct
  source 1..20: mol_type = other RNA
aggcaggaaggccatgcagc

SEQ ID NO: 1620 - RNA, 20 nt, synthetic construct
  source 1..20: mol_type = other RNA
ttggctccaggatgggacag

SEQ ID NO: 1621 - RNA, 20 nt, synthetic construct
  source 1..20: mol_type = other RNA
aaagccttccagtagaatgg

SEQ ID NO: 1622 - RNA, 20 nt, synthetic construct
  source 1..20: mol_type = other RNA
atattagatagagaactaca

SEQ ID NO: 1623 - RNA, 20 nt, synthetic construct
  source 1..20: mol_type = other RNA
cccagtgcaaggcttttggc

SEQ ID NO: 1624 - RNA, 20 nt, synthetic construct
  source 1..20: mol_type = other RNA
tagaaatactctgcagaacg

SEQ ID NO: 1625 - RNA, 20 nt, synthetic construct
  source 1..20: mol_type = other RNA
aatcccaagcctttctccca

SEQ ID NO: 1626 - RNA, 20 nt, synthetic construct
  source 1..20: mol_type = other RNA
gataccaaaggcttctaata

SEQ ID NO: 1627 - RNA, 20 nt, synthetic construct
  source 1..20: mol_type = other RNA
aaactgagcaggcaagcggg

SEQ ID NO: 1628 - RNA, 20 nt, synthetic construct
  source 1..20: mol_type = other RNA
cttttcacggccacctccgc

SEQ ID NO: 1629 - RNA, 20 nt, synthetic construct
  source 1..20: mol_type = other RNA
agaaatccctctgagattgc

SEQ ID NO: 1630 - RNA, 20 nt, synthetic construct
  source 1..20: mol_type = other RNA
gagtatagaaatactctgca

SEQ ID NO: 1631 - RNA, 20 nt, synthetic construct
  source 1..20: mol_type = other RNA
aaggttacatgcccccacac

SEQ ID NO: 1632 - RNA, 20 nt, synthetic construct
  source 1..20: mol_type = other RNA
tttcttcccttccttcctct

SEQ ID NO: 1633 - RNA, 20 nt, synthetic construct
  source 1..20: mol_type = other RNA
ttttatattggctccaggat

SEQ ID NO: 1634 - RNA, 20 nt, synthetic construct
  source 1..20: mol_type = other RNA
gagccagtgacaggctcctt

SEQ ID NO: 1635 - RNA, 20 nt, synthetic construct
  source 1..20: mol_type = other RNA
gaaggtggagtatagaaata

SEQ ID NO: 1636 - RNA, 20 nt, synthetic construct
  source 1..20: mol_type = other RNA
ccactacccagtgcaaggct

SEQ ID NO: 1637 - RNA, 20 nt, synthetic construct
  source 1..20: mol_type = other RNA
ggtttcttttcctcgctagg

SEQ ID NO: 1638 - RNA, 20 nt, synthetic construct
  source 1..20: mol_type = other RNA
aggtcggtgagacaggaaaa

SEQ ID NO: 1639 - RNA, 20 nt, synthetic construct
  source 1..20: mol_type = other RNA
gagaactacagtagacccag

SEQ ID NO: 1640 - RNA, 20 nt, synthetic construct
  source 1..20: mol_type = other RNA
agctgggcaaaggtcacctg

SEQ ID NO: 1641 - RNA, 20 nt, synthetic construct
  source 1..20: mol_type = other RNA
ttagatagagaactacagta

SEQ ID NO: 1642 - RNA, 20 nt, synthetic construct
  source 1..20: mol_type = other RNA
caggcagctctgccactacc

SEQ ID NO: 1643 - RNA, 20 nt, synthetic construct
  source 1..20: mol_type = other RNA
caaggcttttggcccatagc

SEQ ID NO: 1644 - RNA, 20 nt, synthetic construct
  source 1..20: mol_type = other RNA
agagcttctccctccagctc

SEQ ID NO: 1645 - RNA, 20 nt, synthetic construct
  source 1..20: mol_type = other RNA
ggtaggcatggataccaaag

SEQ ID NO: 1646 - RNA, 20 nt, synthetic construct
  source 1..20: mol_type = other RNA
agaaacaataggtttctttt

SEQ ID NO: 1647 - RNA, 20 nt, synthetic construct
  source 1..20: mol_type = other RNA
gggtgggagggggcagagtg

SEQ ID NO: 1648 - RNA, 20 nt, synthetic construct
  source 1..20: mol_type = other RNA
tgctgagaaacaataggttt

SEQ ID NO: 1649 - RNA, 20 nt, synthetic construct
  source 1..20: mol_type = other RNA
gctgggcagggattagtgag

SEQ ID NO: 1650 - RNA, 20 nt, synthetic construct
  source 1..20: mol_type = other RNA
aacaagggacagcatgaccc

SEQ ID NO: 1651 - RNA, 20 nt, synthetic construct
  source 1..20: mol_type = other RNA
gagcaacggaggaagtgggg

SEQ ID NO: 1652 - RNA, 20 nt, synthetic construct
  source 1..20: mol_type = other RNA
ccggctcacctagatgaggt

SEQ ID NO: 1653 - RNA, 20 nt, synthetic construct
  source 1..20: mol_type = other RNA
ggactcagttttttcagtcc

SEQ ID NO: 1654 - RNA, 20 nt, synthetic construct
  source 1..20: mol_type = other RNA
gaaatactctgcagaacggg

SEQ ID NO: 1655 - RNA, 20 nt, synthetic construct
  source 1..20: mol_type = other RNA
ggctagatggctgggtggtg

SEQ ID NO: 1656 - RNA, 20 nt, synthetic construct
  source 1..20: mol_type = other RNA
ggagggggcagagtgaaggt

SEQ ID NO: 1657 - RNA, 20 nt, synthetic construct
  source 1..20: mol_type = other RNA
gctgcttctagggataaaac

SEQ ID NO: 1658 - RNA, 20 nt, synthetic construct
  source 1..20: mol_type = other RNA
cctggagtagctagctgctt

SEQ ID NO: 1659 - RNA, 20 nt, synthetic construct
  source 1..20: mol_type = other RNA
ccagaggagttgagaaatcc

SEQ ID NO: 1660 - RNA, 20 nt, synthetic construct
  source 1..20: mol_type = other RNA
cagccatctgccagaggagt

SEQ ID NO: 1661 - RNA, 20 nt, synthetic construct
  source 1..20: mol_type = other RNA
cccccacactgacctccacc

SEQ ID NO: 1662 - RNA, 20 nt, synthetic construct
  source 1..20: mol_type = other RNA
gatagagaactacagtagac

SEQ ID NO: 1663 - RNA, 20 nt, synthetic construct
  source 1..20: mol_type = other RNA
catgcccccacactgacctc

SEQ ID NO: 1664 - RNA, 20 nt, synthetic construct
  source 1..20: mol_type = other RNA
tgatcccaacagtctcctct

SEQ ID NO: 1665 - RNA, 20 nt, synthetic construct
  source 1..20: mol_type = other RNA
atcccaacagtctcctctgc

SEQ ID NO: 1666 - RNA, 20 nt, synthetic construct
  source 1..20: mol_type = other RNA
gaatggggaatctgtggtgc

SEQ ID NO: 1667 - RNA, 20 nt, synthetic construct
  source 1..20: mol_type = other RNA
gctgggtggtgagagcttct

SEQ ID NO: 1668 - RNA, 20 nt, synthetic construct
  source 1..20: mol_type = other RNA
acccaattgcaggcagctct

SEQ ID NO: 1669 - RNA, 20 nt, synthetic construct
  source 1..20: mol_type = other RNA
ggacagcgggcacagaaggc

SEQ ID NO: 1670 - RNA, 20 nt, synthetic construct
  source 1..20: mol_type = other RNA
gatgaggtcggtgagacagg

SEQ ID NO: 1671 - RNA, 20 nt, synthetic construct
  source 1..20: mol_type = other RNA
tggtgccactgtggagcaac

SEQ ID NO: 1672 - RNA, 20 nt, synthetic construct
  source 1..20: mol_type = other RNA
ggcatggataccaaaggctt

SEQ ID NO: 1673 - RNA, 20 nt, synthetic construct
  source 1..20: mol_type = other RNA
agcaggcaagcggggagggc

SEQ ID NO: 1674 - RNA, 20 nt, synthetic construct
  source 1..20: mol_type = other RNA
agtcccaagccttctgtggg

SEQ ID NO: 1675 - RNA, 20 nt, synthetic construct
  source 1..20: mol_type = other RNA
atagctcagagcaagctaaa

SEQ ID NO: 1676 - RNA, 20 nt, synthetic construct
  source 1..20: mol_type = other RNA
gggataaaactgagcaggca

SEQ ID NO: 1677 - RNA, 20 nt, synthetic construct
  source 1..20: mol_type = other RNA
agcagtccagaccagagcct

SEQ ID NO: 1678 - RNA, 20 nt, synthetic construct
  source 1..20: mol_type = other RNA
tgggctagatggctgggtgg

SEQ ID NO: 1679 - RNA, 20 nt, synthetic construct
  source 1..20: mol_type = other RNA
gctcagagcaagctaaacaa

SEQ ID NO: 1680 - RNA, 20 nt, synthetic construct
  source 1..20: mol_type = other RNA
cttctagggataaaactgag

SEQ ID NO: 1681 - RNA, 20 nt, synthetic construct
  source 1..20: mol_type = other RNA
cccatgcttttcacggccac

SEQ ID NO: 1682 - RNA, 20 nt, synthetic construct
  source 1..20: mol_type = other RNA
tattggctccaggatgggac

SEQ ID NO: 1683 - RNA, 20 nt, synthetic construct
  source 1..20: mol_type = other RNA
ggcaaaggtcacctgctgag

SEQ ID NO: 1684 - RNA, 20 nt, synthetic construct
  source 1..20: mol_type = other RNA
cagcctagagccagtgacag

SEQ ID NO: 1685 - RNA, 20 nt, synthetic construct
  source 1..20: mol_type = other RNA
aaaagcatgggcaatctcag

SEQ ID NO: 1686 - RNA, 20 nt, synthetic construct
  source 1..20: mol_type = other RNA
ctccaggtaatgcccctggg

SEQ ID NO: 1687 - RNA, 20 nt, synthetic construct
  source 1..20: mol_type = other RNA
gctactccaggtaatgcccc

SEQ ID NO: 1688 - RNA, 20 nt, synthetic construct
  source 1..20: mol_type = other RNA
tcccctgtcttttcctgtct

SEQ ID NO: 1689 - RNA, 20 nt, synthetic construct
  source 1..20: mol_type = other RNA
tgcccgctgtcccatcctgg

SEQ ID NO: 1690 - RNA, 20 nt, synthetic construct
  source 1..20: mol_type = other RNA
ctcagttttatccctagaag

SEQ ID NO: 1691 - RNA, 20 nt, synthetic construct
  source 1..20: mol_type = other RNA
cagagtatttctatactcca

SEQ ID NO: 1692 - RNA, 20 nt, synthetic construct
  source 1..20: mol_type = other RNA
ctgtcccttgtttagcttgc

SEQ ID NO: 1693 - RNA, 20 nt, synthetic construct
  source 1..20: mol_type = other RNA
ggtgagccggtagctgatcc

SEQ ID NO: 1694 - RNA, 20 nt, synthetic construct
  source 1..20: mol_type = other RNA
ctggaaggctttcaggtggc

SEQ ID NO: 1695 - RNA, 20 nt, synthetic construct
  source 1..20: mol_type = other RNA
ggccaaaagccttgcactgg

SEQ ID NO: 1696 - RNA, 20 nt, synthetic construct
  source 1..20: mol_type = other RNA
cccctggggaggagaggaag

SEQ ID NO: 1697 - RNA, 20 nt, synthetic construct
  source 1..20: mol_type = other RNA
ctgtagttctctatctaata

SEQ ID NO: 1698 - RNA, 20 nt, synthetic construct
  source 1..20: mol_type = other RNA
ggtctactgtagttctctat

SEQ ID NO: 1699 - RNA, 20 nt, synthetic construct
  source 1..20: mol_type = other RNA
tctaatatcagtgggagaaa

SEQ ID NO: 1700 - RNA, 20 nt, synthetic construct
  source 1..20: mol_type = other RNA
atcccttggtggcggaggtg

SEQ ID NO: 1701 - RNA, 20 nt, synthetic construct
  source 1..20: mol_type = other RNA
gatgtcccgttctgcagagt

SEQ ID NO: 1702 - RNA, 20 nt, synthetic construct
  source 1..20: mol_type = other RNA
cctgctcagttttatcccta

SEQ ID NO: 1703 - RNA, 20 nt, synthetic construct
  source 1..20: mol_type = other RNA
aaacaggtcacagccctccc

SEQ ID NO: 1704 - RNA, 20 nt, synthetic construct
  source 1..20: mol_type = other RNA
tcactggctctaggctgtaa

SEQ ID NO: 1705 - RNA, 20 nt, synthetic construct
  source 1..20: mol_type = other RNA
ctctgagctattagaagcct

SEQ ID NO: 1706 - RNA, 20 nt, synthetic construct
  source 1..20: mol_type = other RNA
atccctgcccagctacggca

SEQ ID NO: 1707 - RNA, 20 nt, synthetic construct
  source 1..20: mol_type = other RNA
gcttctgtgaaggagcctgt

SEQ ID NO: 1708 - RNA, 20 nt, synthetic construct
  source 1..20: mol_type = other RNA
tagttctctatctaatatca

SEQ ID NO: 1709 - RNA, 20 nt, synthetic construct
  source 1..20: mol_type = other RNA
cggcagaggagactgttggg

SEQ ID NO: 1710 - RNA, 20 nt, synthetic construct
  source 1..20: mol_type = other RNA
aaggagcctgtcactggctc

SEQ ID NO: 1711 - RNA, 20 nt, synthetic construct
  source 1..20: mol_type = other RNA
gcccacagaaggcttgggac

SEQ ID NO: 1712 - RNA, 20 nt, synthetic construct
  source 1..20: mol_type = other RNA
tccctagaagcagctagcta

SEQ ID NO: 1713 - RNA, 20 nt, synthetic construct
  source 1..20: mol_type = other RNA
cctacccaggactgaaaaaa

SEQ ID NO: 1714 - RNA, 20 nt, synthetic construct
  source 1..20: mol_type = other RNA
ttgtttctcagcatattaga

SEQ ID NO: 1715 - RNA, 20 nt, synthetic construct
  source 1..20: mol_type = other RNA
ttgggatcacaggtggaggt

SEQ ID NO: 1716 - RNA, 20 nt, synthetic construct
  source 1..20: mol_type = other RNA
gcagatggctgcatggcctt

SEQ ID NO: 1717 - RNA, 20 nt, synthetic construct
  source 1..20: mol_type = other RNA
cctcaggctctggtctggac

SEQ ID NO: 1718 - RNA, 20 nt, synthetic construct
  source 1..20: mol_type = other RNA
acctttgcccagctcactgg

SEQ ID NO: 1719 - RNA, 20 nt, synthetic construct
  source 1..20: mol_type = other RNA
gtatccatgcctacccagga

SEQ ID NO: 1720 - RNA, 20 nt, synthetic construct
  source 1..20: mol_type = other RNA
gaagcctttggtatccatgc

SEQ ID NO: 1721 - RNA, 20 nt, synthetic construct
  source 1..20: mol_type = other RNA
ggggcatgtaaccttcactc

SEQ ID NO: 1722 - RNA, 20 nt, synthetic construct
  source 1..20: mol_type = other RNA
gggaaagggaggctatgggc

SEQ ID NO: 1723 - RNA, 20 nt, synthetic construct
  source 1..20: mol_type = other RNA
tgaaggagcctgtcactggc

SEQ ID NO: 1724 - RNA, 20 nt, synthetic construct
  source 1..20: mol_type = other RNA
gggggggctagaagctgggg

SEQ ID NO: 1725 - RNA, 20 nt, synthetic construct
  source 1..20: mol_type = other RNA
ggtagtggcagagctgcctg

SEQ ID NO: 1726 - RNA, 20 nt, synthetic construct
  source 1..20: mol_type = other RNA
tcccatcctggagccaatat

SEQ ID NO: 1727 - RNA, 20 nt, synthetic construct
  source 1..20: mol_type = other RNA
gaagctggggaaagggaggc

SEQ ID NO: 1728 - RNA, 20 nt, synthetic construct
  source 1..20: mol_type = other RNA
gctgatcccttggtggcgga

SEQ ID NO: 1729 - RNA, 20 nt, synthetic construct
  source 1..20: mol_type = other RNA
gcgaggaaaagaaacctatt

SEQ ID NO: 1730 - RNA, 20 nt, synthetic construct
  source 1..20: mol_type = other RNA
gactgctcagcaggtgacct

SEQ ID NO: 1731 - RNA, 20 nt, synthetic construct
  source 1..20: mol_type = other RNA
gaaggctttcaggtggcttc

SEQ ID NO: 1732 - RNA, 20 nt, synthetic construct
  source 1..20: mol_type = other RNA
aggtccaaggcttgtcccct

SEQ ID NO: 1733 - RNA, 20 nt, synthetic construct
  source 1..20: mol_type = other RNA
tggggggggctagaagctgg

SEQ ID NO: 1734 - RNA, 20 nt, synthetic construct
  source 1..20: mol_type = other RNA
tttctcagcatattagagta

SEQ ID NO: 1735 - RNA, 20 nt, synthetic construct
  source 1..20: mol_type = other RNA
ggcaatctcagagggatttc

SEQ ID NO: 1736 - RNA, 20 nt, synthetic construct
  source 1..20: mol_type = other RNA
aagcaggcctgaggtccaag

SEQ ID NO: 1737 - RNA, 20 nt, synthetic construct
  source 1..20: mol_type = other RNA
tctcaccgacctcatctagg

SEQ ID NO: 1738 - RNA, 20 nt, synthetic construct
  source 1..20: mol_type = other RNA
tcccgttctgcagagtattt

SEQ ID NO: 1739 - RNA, 20 nt, synthetic construct
  source 1..20: mol_type = other RNA
tcagtgggagaaaggcttgg

SEQ ID NO: 1740 - RNA, 20 nt, synthetic construct
  source 1..20: mol_type = other RNA
gaagcagctagctactccag

SEQ ID NO: 1741 - RNA, 20 nt, synthetic construct
  source 1..20: mol_type = other RNA
atatcagtgggagaaaggct

SEQ ID NO: 1742 - RNA, 20 nt, synthetic construct
  source 1..20: mol_type = other RNA
atgcccctggggaggagagg

SEQ ID NO: 1743 - RNA, 20 nt, synthetic construct
  source 1..20: mol_type = other RNA
tcccttgtttagcttgctct

SEQ ID NO: 1744 - RNA, 20 nt, synthetic construct
  source 1..20: mol_type = other RNA
cccgctgtcccatcctggag

SEQ ID NO: 1745 - RNA, 20 nt, synthetic construct
  source 1..20: mol_type = other RNA
gagccaatataaaacaggtc

SEQ ID NO: 1746 - RNA, 20 nt, synthetic construct
  source 1..20: mol_type = other RNA
gccttcctgcctcaggctct

SEQ ID NO: 1747 - RNA, 20 nt, synthetic construct
  source 1..20: mol_type = other RNA
ggctgtaaagcaggcctgag

SEQ ID NO: 1748 - RNA, 20 nt, synthetic construct
  source 1..20: mol_type = other RNA
taaagcaggcctgaggtcca

SEQ ID NO: 1749 - RNA, 20 nt, synthetic construct
  source 1..20: mol_type = other RNA
gcggaggtggccgtgaaaag

SEQ ID NO: 1750 - RNA, 20 nt, synthetic construct
  source 1..20: mol_type = other RNA
agccggtagctgatcccttg

SEQ ID NO: 1751 - RNA, 20 nt, synthetic construct
  source 1..20: mol_type = other RNA
gtggcggaggtggccgtgaa

SEQ ID NO: 1752 - RNA, 20 nt, synthetic construct
  source 1..20: mol_type = other RNA
tactccaccttccaccccac

SEQ ID NO: 1753 - RNA, 20 nt, synthetic construct
  source 1..20: mol_type = other RNA
gttctctatctaatatcagt

SEQ ID NO: 1754 - RNA, 20 nt, synthetic construct
  source 1..20: mol_type = other RNA
cccagctcactgggccttct

SEQ ID NO: 1755 - RNA, 20 nt, synthetic construct
  source 1..20: mol_type = other RNA
tgggccaaaagccttgcact

SEQ ID NO: 1756 - RNA, 20 nt, synthetic construct
  source 1..20: mol_type = other RNA
ctccaccttccaccccactt

SEQ ID NO: 1757 - RNA, 20 nt, synthetic construct
  source 1..20: mol_type = other RNA
gaggtcagtgtgggggcatg

SEQ ID NO: 1758 - RNA, 20 nt, synthetic construct
  source 1..20: mol_type = other RNA
cactgggtagtggcagagct

SEQ ID NO: 1759 - RNA, 20 nt, synthetic construct
  source 1..20: mol_type = other RNA
cccaggactgaaaaaactga

SEQ ID NO: 1760 - RNA, 20 nt, synthetic construct
  source 1..20: mol_type = other RNA
cctgcaattgggtcatgctg

SEQ ID NO: 1761 - RNA, 20 nt, synthetic construct
  source 1..20: mol_type = other RNA
ccccctcccaccccacttcc

SEQ ID NO: 1762 - RNA, 20 nt, synthetic construct
  source 1..20: mol_type = other RNA
ggagaaaggcttgggattca

SEQ ID NO: 1763 - RNA, 20 nt, synthetic construct
  source 1..20: mol_type = other RNA
taaccttcactctgccccct

SEQ ID NO: 1764 - RNA, 20 nt, synthetic construct
  source 1..20: mol_type = other RNA
catggccttcctgcctcagg

SEQ ID NO: 1765 - RNA, 20 nt, synthetic construct
  source 1..20: mol_type = other RNA
tccatgcctacccaggactg

SEQ ID NO: 1766 - RNA, 20 nt, synthetic construct
  source 1..20: mol_type = other RNA
ctccacagtggcaccacaga

SEQ ID NO: 1767 - RNA, 20 nt, synthetic construct
  source 1..20: mol_type = other RNA
ggccttctgtgcccgctgtc

SEQ ID NO: 1768 - RNA, 20 nt, synthetic construct
  source 1..20: mol_type = other RNA
gtctggactgctcagcaggt

SEQ ID NO: 1769 - RNA, 20 nt, synthetic construct
  source 1..20: mol_type = other RNA
ctcagcaggtgacctttgcc

SEQ ID NO: 1770 - RNA, 20 nt, synthetic construct
  source 1..20: mol_type = other RNA
gcttgctctgagctattaga

SEQ ID NO: 1771 - RNA, 20 nt, synthetic construct
  source 1..20: mol_type = other RNA
tccttctctcactaatccct

SEQ ID NO: 1772 - RNA, 20 nt, synthetic construct
  source 1..20: mol_type = other RNA
ttagagtagatgtcccgttc

SEQ ID NO: 1773 - RNA, 20 nt, synthetic construct
  source 1..20: mol_type = other RNA
taaaacaggtcacagccctc

SEQ ID NO: 1774 - RNA, 20 nt, synthetic construct
  source 1..20: mol_type = other RNA
agtcctagcgaggaaaagaa

SEQ ID NO: 1775 - RNA, 20 nt, synthetic construct
  source 1..20: mol_type = other RNA
gagggagaagctctcaccac

SEQ ID NO: 1776 - RNA, 20 nt, synthetic construct
  source 1..20: mol_type = other RNA
gtctccacccttgggttcct

SEQ ID NO: 1777 - RNA, 20 nt, synthetic construct
  source 1..20: mol_type = other RNA
cccagctacggcagaggaga

SEQ ID NO: 1778 - RNA, 20 nt, synthetic construct
  source 1..20: mol_type = other RNA
tttagcttgctctgagctat

SEQ ID NO: 1779 - RNA, 20 nt, synthetic construct
  source 1..20: mol_type = other RNA
ggactcatggtctccaccct

SEQ ID NO: 1780 - RNA, 20 nt, synthetic construct
  source 1..20: mol_type = other RNA
ggtcatgctgtcccttgttt

SEQ ID NO: 1781 - RNA, 20 nt, synthetic construct
  source 1..20: mol_type = other RNA
gccgtgaaaagcatgggcaa

SEQ ID NO: 1782 - RNA, 20 nt, synthetic construct
  source 1..20: mol_type = other RNA
ttagaagcctttggtatcca

SEQ ID NO: 1783 - RNA, 20 nt, synthetic construct
  source 1..20: mol_type = other RNA
ggatcacaggtggaggtcag

SEQ ID NO: 1784 - RNA, 20 nt, synthetic construct
  source 1..20: mol_type = other RNA
caattgggtcatgctgtccc

SEQ ID NO: 1785 - RNA, 20 nt, synthetic construct
  source 1..20: mol_type = other RNA
gctctaggctgtaaagcagg

SEQ ID NO: 1786 - RNA, 20 nt, synthetic construct
  source 1..20: mol_type = other RNA
ggttcctggtgtgggggggg

SEQ ID NO: 1787 - RNA, 20 nt, synthetic construct
  source 1..20: mol_type = other RNA
gtggcagagctgcctgcaat

SEQ ID NO: 1788 - RNA, 20 nt, synthetic construct
  source 1..20: mol_type = other RNA
gcaccacagattccccattc

SEQ ID NO: 1789 - RNA, 20 nt, synthetic construct
  source 1..20: mol_type = other RNA
tttctatactccaccttcca

SEQ ID NO: 1790 - RNA, 20 nt, synthetic construct
  source 1..20: mol_type = other RNA
gtgtggggggggctagaagc

SEQ ID NO: 1791 - RNA, 20 nt, synthetic construct
  source 1..20: mol_type = other RNA
accttcactctgccccctcc

SEQ ID NO: 1792 - RNA, 20 nt, synthetic construct
  source 1..20: mol_type = other RNA
gctgcatggccttcctgcct

SEQ ID NO: 1793 - RNA, 20 nt, synthetic construct
  source 1..20: mol_type = other RNA
tgggggcatgtaaccttcac

SEQ ID NO: 1794 - RNA, 20 nt, synthetic construct
  source 1..20: mol_type = other RNA
gggggctgggtctactgtag

SEQ ID NO: 1795 - RNA, 20 nt, synthetic construct
  source 1..20: mol_type = other RNA
gcagagctgcctgcaattgg

SEQ ID NO: 1796 - RNA, 20 nt, synthetic construct
  source 1..20: mol_type = other RNA
aaaaaactgagtcctagcga

SEQ ID NO: 1797 - RNA, 20 nt, synthetic construct
  source 1..20: mol_type = other RNA
agctattagaagcctttggt

SEQ ID NO: 1798 - RNA, 20 nt, synthetic construct
  source 1..20: mol_type = other RNA
gggaggagaggaaggaaggg

SEQ ID NO: 1799 - RNA, 20 nt, synthetic construct
  source 1..20: mol_type = other RNA
tcttttcctgtctcaccgac

SEQ ID NO: 1800 - RNA, 20 nt, synthetic construct
  source 1..20: mol_type = other RNA
gagtagatgtcccgttctgc

SEQ ID NO: 1801 - RNA, 20 nt, synthetic construct
  source 1..20: mol_type = other RNA
ctccttgggctcacctgcac

SEQ ID NO: 1802 - RNA, 20 nt, synthetic construct
  source 1..20: mol_type = other RNA
acgctcagagtgaggacaaa

SEQ ID NO: 1803 - RNA, 20 nt, synthetic construct
  source 1..20: mol_type = other RNA
atccccactccaatcctcct

SEQ ID NO: 1804 - RNA, 20 nt, synthetic construct
  source 1..20: mol_type = other RNA
ctgagccccacctctttagc

SEQ ID NO: 1805 - RNA, 20 nt, synthetic construct
  source 1..20: mol_type = other RNA
aggacaaaaccccaaatcct

SEQ ID NO: 1806 - RNA, 20 nt, synthetic construct
  source 1..20: mol_type = other RNA
cattcccccctcttaatccc

SEQ ID NO: 1807 - RNA, 20 nt, synthetic construct
  source 1..20: mol_type = other RNA
gggagccaaggactggctca

SEQ ID NO: 1808 - RNA, 20 nt, synthetic construct
  source 1..20: mol_type = other RNA
gccacatgtgcggcctcatc

SEQ ID NO: 1809 - RNA, 20 nt, synthetic construct
  source 1..20: mol_type = other RNA
attaaacattaacgggcccc

SEQ ID NO: 1810 - RNA, 20 nt, synthetic construct
  source 1..20: mol_type = other RNA
ggggccgggagatcacgcca

SEQ ID NO: 1811 - RNA, 20 nt, synthetic construct
  source 1..20: mol_type = other RNA
tacttctccctccaacaata

SEQ ID NO: 1812 - RNA, 20 nt, synthetic construct
  source 1..20: mol_type = other RNA
atctccatcctcgtcctggg

SEQ ID NO: 1813 - RNA, 20 nt, synthetic construct
  source 1..20: mol_type = other RNA
attgggctgcaaacgggacc

SEQ ID NO: 1814 - RNA, 20 nt, synthetic construct
  source 1..20: mol_type = other RNA
atgtctctggggagccaagg

SEQ ID NO: 1815 - RNA, 20 nt, synthetic construct
  source 1..20: mol_type = other RNA
ttacattcccccctcttaat

SEQ ID NO: 1816 - RNA, 20 nt, synthetic construct
  source 1..20: mol_type = other RNA
cttctccctccaacaatatt

SEQ ID NO: 1817 - RNA, 20 nt, synthetic construct
  source 1..20: mol_type = other RNA
acccatgactcttcactgcg

SEQ ID NO: 1818 - RNA, 20 nt, synthetic construct
  source 1..20: mol_type = other RNA
ctaaaggatcaggtttcggc

SEQ ID NO: 1819 - RNA, 20 nt, synthetic construct
  source 1..20: mol_type = other RNA
cctggcacccataccttgga

SEQ ID NO: 1820 - RNA, 20 nt, synthetic construct
  source 1..20: mol_type = other RNA
gcggtggccacatgtgcggc

SEQ ID NO: 1821 - RNA, 20 nt, synthetic construct
  source 1..20: mol_type = other RNA
gaagccttctggggtgtggg

SEQ ID NO: 1822 - RNA, 20 nt, synthetic construct
  source 1..20: mol_type = other RNA
gacgcctgggggccgggaga

SEQ ID NO: 1823 - RNA, 20 nt, synthetic construct
  source 1..20: mol_type = other RNA
tatcccttccctccctggcc

SEQ ID NO: 1824 - RNA, 20 nt, synthetic construct
  source 1..20: mol_type = other RNA
acgggccccggtactaaagg

SEQ ID NO: 1825 - RNA, 20 nt, synthetic construct
  source 1..20: mol_type = other RNA
aactttgcactccatccagc

SEQ ID NO: 1826 - RNA, 20 nt, synthetic construct
  source 1..20: mol_type = other RNA
gatgagcagagaagaccccc

SEQ ID NO: 1827 - RNA, 20 nt, synthetic construct
  source 1..20: mol_type = other RNA
gagaccaccagacggctaga

SEQ ID NO: 1828 - RNA, 20 nt, synthetic construct
  source 1..20: mol_type = other RNA
gcacccataccttggagcaa

SEQ ID NO: 1829 - RNA, 20 nt, synthetic construct
  source 1..20: mol_type = other RNA
gcatttccggggtctcccag

SEQ ID NO: 1830 - RNA, 20 nt, synthetic construct
  source 1..20: mol_type = other RNA
cccatcggggcgaggagagg

SEQ ID NO: 1831 - RNA, 20 nt, synthetic construct
  source 1..20: mol_type = other RNA
aacattaacgggccccggta

SEQ ID NO: 1832 - RNA, 20 nt, synthetic construct
  source 1..20: mol_type = other RNA
ctggacgcctgggggccggg

SEQ ID NO: 1833 - RNA, 20 nt, synthetic construct
  source 1..20: mol_type = other RNA
gacgcctgggactcggggca

SEQ ID NO: 1834 - RNA, 20 nt, synthetic construct
  source 1..20: mol_type = other RNA
tcccttccctccctggcctc

SEQ ID NO: 1835 - RNA, 20 nt, synthetic construct
  source 1..20: mol_type = other RNA
cgggccgtgatgtctctggg

SEQ ID NO: 1836 - RNA, 20 nt, synthetic construct
  source 1..20: mol_type = other RNA
ccttggagcaacggcggaag

SEQ ID NO: 1837 - RNA, 20 nt, synthetic construct
  source 1..20: mol_type = other RNA
actcttcactgcgtggagtg

SEQ ID NO: 1838 - RNA, 20 nt, synthetic construct
  source 1..20: mol_type = other RNA
gcagcaacagcagcagcagc

SEQ ID NO: 1839 - RNA, 20 nt, synthetic construct
  source 1..20: mol_type = other RNA
ccgacttcccgacttcccgc

SEQ ID NO: 1840 - RNA, 20 nt, synthetic construct
  source 1..20: mol_type = other RNA
gagcaacggcggaaggtggc

SEQ ID NO: 1841 - RNA, 20 nt, synthetic construct
  source 1..20: mol_type = other RNA
tgcggcctcatcagccaggc

SEQ ID NO: 1842 - RNA, 20 nt, synthetic construct
  source 1..20: mol_type = other RNA
ccaactcagaggcgtgctga

SEQ ID NO: 1843 - RNA, 20 nt, synthetic construct
  source 1..20: mol_type = other RNA
actaacttctcctgggccct

SEQ ID NO: 1844 - RNA, 20 nt, synthetic construct
  source 1..20: mol_type = other RNA
acttctcctgggccctcctc

SEQ ID NO: 1845 - RNA, 20 nt, synthetic construct
  source 1..20: mol_type = other RNA
cgtggagtgccgacttcccg

SEQ ID NO: 1846 - RNA, 20 nt, synthetic construct
  source 1..20: mol_type = other RNA
ggccctcctcctgtgaccca

SEQ ID NO: 1847 - RNA, 20 nt, synthetic construct
  source 1..20: mol_type = other RNA
agcagagaagacccccgaag

SEQ ID NO: 1848 - RNA, 20 nt, synthetic construct
  source 1..20: mol_type = other RNA
ggactcggggcacttggctc

SEQ ID NO: 1849 - RNA, 20 nt, synthetic construct
  source 1..20: mol_type = other RNA
cgcgtccacgtgaaggtgga

SEQ ID NO: 1850 - RNA, 20 nt, synthetic construct
  source 1..20: mol_type = other RNA
agccccacctctttagcatt

SEQ ID NO: 1851 - RNA, 20 nt, synthetic construct
  source 1..20: mol_type = other RNA
gagtgccgacttcccgactt

SEQ ID NO: 1852 - RNA, 20 nt, synthetic construct
  source 1..20: mol_type = other RNA
cctgcctaaactttgcactc

SEQ ID NO: 1853 - RNA, 20 nt, synthetic construct
  source 1..20: mol_type = other RNA
tctctggggagccaaggact

SEQ ID NO: 1854 - RNA, 20 nt, synthetic construct
  source 1..20: mol_type = other RNA
gggtgtgggtactggacgcc

SEQ ID NO: 1855 - RNA, 20 nt, synthetic construct
  source 1..20: mol_type = other RNA
gcctcagaaagagagagaga

SEQ ID NO: 1856 - RNA, 20 nt, synthetic construct
  source 1..20: mol_type = other RNA
cgcgcggcctcgggaaggac

SEQ ID NO: 1857 - RNA, 20 nt, synthetic construct
  source 1..20: mol_type = other RNA
cactccatccagcctgtatc

SEQ ID NO: 1858 - RNA, 20 nt, synthetic construct
  source 1..20: mol_type = other RNA
ggacgggagggcgagcatca

SEQ ID NO: 1859 - RNA, 20 nt, synthetic construct
  source 1..20: mol_type = other RNA
ggctgcaaacgggacctgtt

SEQ ID NO: 1860 - RNA, 20 nt, synthetic construct
  source 1..20: mol_type = other RNA
tgacccatgactcttcactg

SEQ ID NO: 1861 - RNA, 20 nt, synthetic construct
  source 1..20: mol_type = other RNA
aaggtggaagccttctgggg

SEQ ID NO: 1862 - RNA, 20 nt, synthetic construct
  source 1..20: mol_type = other RNA
gctcagtcctctagcctcag

SEQ ID NO: 1863 - RNA, 20 nt, synthetic construct
  source 1..20: mol_type = other RNA
cctaaactttgcactccatc

SEQ ID NO: 1864 - RNA, 20 nt, synthetic construct
  source 1..20: mol_type = other RNA
cggcctcatcagccaggcca

SEQ ID NO: 1865 - RNA, 20 nt, synthetic construct
  source 1..20: mol_type = other RNA
gggcacagtagcagcaacag

SEQ ID NO: 1866 - RNA, 20 nt, synthetic construct
  source 1..20: mol_type = other RNA
tgggtactggacgcctgggg

SEQ ID NO: 1867 - RNA, 20 nt, synthetic construct
  source 1..20: mol_type = other RNA
ggcaccagcgccggtggggc

SEQ ID NO: 1868 - RNA, 20 nt, synthetic construct
  source 1..20: mol_type = other RNA
ggtactggacgcctgggggc

SEQ ID NO: 1869 - RNA, 20 nt, synthetic construct
  source 1..20: mol_type = other RNA
gcctccagccctctgctcct

SEQ ID NO: 1870 - RNA, 20 nt, synthetic construct
  source 1..20: mol_type = other RNA
ggtgcccatcggggcgagga

SEQ ID NO: 1871 - RNA, 20 nt, synthetic construct
  source 1..20: mol_type = other RNA
caaacgggacctgttacatt

SEQ ID NO: 1872 - RNA, 20 nt, synthetic construct
  source 1..20: mol_type = other RNA
aaggatcaggtttcggcctc

SEQ ID NO: 1873 - RNA, 20 nt, synthetic construct
  source 1..20: mol_type = other RNA
gctccggggctgcgggccgt

SEQ ID NO: 1874 - RNA, 20 nt, synthetic construct
  source 1..20: mol_type = other RNA
ttaactaacttctcctgggc

SEQ ID NO: 1875 - RNA, 20 nt, synthetic construct
  source 1..20: mol_type = other RNA
ggatttggggttttgtcctc

SEQ ID NO: 1876 - RNA, 20 nt, synthetic construct
  source 1..20: mol_type = other RNA
gggattaagaggggggaatg

SEQ ID NO: 1877 - RNA, 20 nt, synthetic construct
  source 1..20: mol_type = other RNA
gcctggctgatgaggccgca

SEQ ID NO: 1878 - RNA, 20 nt, synthetic construct
  source 1..20: mol_type = other RNA
gagtgcaaagtttaggcagg

SEQ ID NO: 1879 - RNA, 20 nt, synthetic construct
  source 1..20: mol_type = other RNA
gccgctgttgccgctgttgc

SEQ ID NO: 1880 - RNA, 20 nt, synthetic construct
  source 1..20: mol_type = other RNA
cccaggacgaggatggagat

SEQ ID NO: 1881 - RNA, 20 nt, synthetic construct
  source 1..20: mol_type = other RNA
acaggtcccgtttgcagccc

SEQ ID NO: 1882 - RNA, 20 nt, synthetic construct
  source 1..20: mol_type = other RNA
ctgctactgtgccccaccgg

SEQ ID NO: 1883 - RNA, 20 nt, synthetic construct
  source 1..20: mol_type = other RNA
gctgggagaccccggaaatg

SEQ ID NO: 1884 - RNA, 20 nt, synthetic construct
  source 1..20: mol_type = other RNA
ccgctgttgccgccgctgct

SEQ ID NO: 1885 - RNA, 20 nt, synthetic construct
  source 1..20: mol_type = other RNA
tcctcactctgagcgtcatt

SEQ ID NO: 1886 - RNA, 20 nt, synthetic construct
  source 1..20: mol_type = other RNA
ccccaccggcgctggtgccc

SEQ ID NO: 1887 - RNA, 20 nt, synthetic construct
  source 1..20: mol_type = other RNA
gggctcggggtggcgtgatc

SEQ ID NO: 1888 - RNA, 20 nt, synthetic construct
  source 1..20: mol_type = other RNA
cgtggctgcggtggccgctg

SEQ ID NO: 1889 - RNA, 20 nt, synthetic construct
  source 1..20: mol_type = other RNA
gggttggggtgatgctcttc

SEQ ID NO: 1890 - RNA, 20 nt, synthetic construct
  source 1..20: mol_type = other RNA
ctaaagaggtggggctcagc

SEQ ID NO: 1891 - RNA, 20 nt, synthetic construct
  source 1..20: mol_type = other RNA
aagaggtggggctcagcacg

SEQ ID NO: 1892 - RNA, 20 nt, synthetic construct
  source 1..20: mol_type = other RNA
aggaggattggagtggggat

SEQ ID NO: 1893 - RNA, 20 nt, synthetic construct
  source 1..20: mol_type = other RNA
agaggggggaatgtaacagg

SEQ ID NO: 1894 - RNA, 20 nt, synthetic construct
  source 1..20: mol_type = other RNA
aagagtcatgggtcacagga

SEQ ID NO: 1895 - RNA, 20 nt, synthetic construct
  source 1..20: mol_type = other RNA
atattgttggagggagaagt

SEQ ID NO: 1896 - RNA, 20 nt, synthetic construct
  source 1..20: mol_type = other RNA
ccgccgctgctgctgctgtt

SEQ ID NO: 1897 - RNA, 20 nt, synthetic construct
  source 1..20: mol_type = other RNA
ctgctgctgttgctgctact

SEQ ID NO: 1898 - RNA, 20 nt, synthetic construct
  source 1..20: mol_type = other RNA
caaagtttaggcaggtagcg

SEQ ID NO: 1899 - RNA, 20 nt, synthetic construct
  source 1..20: mol_type = other RNA
agccagtccttggctcccca

SEQ ID NO: 1900 - RNA, 20 nt, synthetic construct
  source 1..20: mol_type = other RNA
ctactgtgccccaccggcgc

SEQ ID NO: 1901 - RNA, 20 nt, synthetic construct
  source 1..20: mol_type = other RNA
ttgccgctgttgccgccgct

SEQ ID NO: 1902 - RNA, 20 nt, synthetic construct
  source 1..20: mol_type = other RNA
cggtggccgctgttgccgct

SEQ ID NO: 1903 - RNA, 20 nt, synthetic construct
  source 1..20: mol_type = other RNA
gtgcccaggacgaggatgga

SEQ ID NO: 1904 - RNA, 20 nt, synthetic construct
  source 1..20: mol_type = other RNA
cagcccaattaggatttggg

SEQ ID NO: 1905 - RNA, 20 nt, synthetic construct
  source 1..20: mol_type = other RNA
ctgtgccccaccggcgctgg

SEQ ID NO: 1906 - RNA, 20 nt, synthetic construct
  source 1..20: mol_type = other RNA
acgctgtctggggagggcga

SEQ ID NO: 1907 - RNA, 20 nt, synthetic construct
  source 1..20: mol_type = other RNA
caggtgagcccaaggagcag

SEQ ID NO: 1908 - RNA, 20 nt, synthetic construct
  source 1..20: mol_type = other RNA
aagagctgatgctcgccctc

SEQ ID NO: 1909 - RNA, 20 nt, synthetic construct
  source 1..20: mol_type = other RNA
atgtttaatcagagaggatc

SEQ ID NO: 1910 - RNA, 20 nt, synthetic construct
  source 1..20: mol_type = other RNA
atcagagaggatcttccgat

SEQ ID NO: 1911 - RNA, 20 nt, synthetic construct
  source 1..20: mol_type = other RNA
agttggcaccccgcctgagg

SEQ ID NO: 1912 - RNA, 20 nt, synthetic construct
  source 1..20: mol_type = other RNA
atgctcgccctcccgtccca

SEQ ID NO: 1913 - RNA, 20 nt, synthetic construct
  source 1..20: mol_type = other RNA
caggggtggctgggagaccc

SEQ ID NO: 1914 - RNA, 20 nt, synthetic construct
  source 1..20: mol_type = other RNA
ccaggcaacggcgttgcttt

SEQ ID NO: 1915 - RNA, 20 nt, synthetic construct
  source 1..20: mol_type = other RNA
gggtgcaggtgagcccaagg

SEQ ID NO: 1916 - RNA, 20 nt, synthetic construct
  source 1..20: mol_type = other RNA
taacaggtcccgtttgcagc

SEQ ID NO: 1917 - RNA, 20 nt, synthetic construct
  source 1..20: mol_type = other RNA
gtaccggggcccgttaatgt

SEQ ID NO: 1918 - RNA, 20 nt, synthetic construct
  source 1..20: mol_type = other RNA
gggagggcgaggccgaaacc

SEQ ID NO: 1919 - RNA, 20 nt, synthetic construct
  source 1..20: mol_type = other RNA
gctgcggtggccgctgttgc

SEQ ID NO: 1920 - RNA, 20 nt, synthetic construct
  source 1..20: mol_type = other RNA
caggctggatggagtgcaaa

SEQ ID NO: 1921 - RNA, 20 nt, synthetic construct
  source 1..20: mol_type = other RNA
gggtgatgctcttcgggggt

SEQ ID NO: 1922 - RNA, 20 nt, synthetic construct
  source 1..20: mol_type = other RNA
atcctttagtaccggggccc

SEQ ID NO: 1923 - RNA, 20 nt, synthetic construct
  source 1..20: mol_type = other RNA
gcgggaagtcgggaagtcgg

SEQ ID NO: 1924 - RNA, 20 nt, synthetic construct
  source 1..20: mol_type = other RNA
tttaatcagagaggatcttc

SEQ ID NO: 1925 - RNA, 20 nt, synthetic construct
  source 1..20: mol_type = other RNA
cccacaccccagaaggcttc

SEQ ID NO: 1926 - RNA, 20 nt, synthetic construct
  source 1..20: mol_type = other RNA
gaggactgagccagtccttg

SEQ ID NO: 1927 - RNA, 20 nt, synthetic construct
  source 1..20: mol_type = other RNA
ggcaggtagcgggaagtcgg

SEQ ID NO: 1928 - RNA, 20 nt, synthetic construct
  source 1..20: mol_type = other RNA
gccgtctggtggtctctaag

SEQ ID NO: 1929 - RNA, 20 nt, synthetic construct
  source 1..20: mol_type = other RNA
ccccgagtcccaggcgtcca

SEQ ID NO: 1930 - RNA, 20 nt, synthetic construct
  source 1..20: mol_type = other RNA
gggttttgtcctcactctga

SEQ ID NO: 1931 - RNA, 20 nt, synthetic construct
  source 1..20: mol_type = other RNA
ctcgccctcccgtcccagga

SEQ ID NO: 1932 - RNA, 20 nt, synthetic construct
  source 1..20: mol_type = other RNA
ctccaaggtatgggtgccag

SEQ ID NO: 1933 - RNA, 20 nt, synthetic construct
  source 1..20: mol_type = other RNA
tgaagagctgatgctcgccc

SEQ ID NO: 1934 - RNA, 20 nt, synthetic construct
  source 1..20: mol_type = other RNA
ctgctgttgctgctactgtg

SEQ ID NO: 1935 - RNA, 20 nt, synthetic construct
  source 1..20: mol_type = other RNA
ctgttgctgctactgtgccc

SEQ ID NO: 1936 - RNA, 20 nt, synthetic construct
  source 1..20: mol_type = other RNA
gctgatgaggccgcacatgt

SEQ ID NO: 1937 - RNA, 20 nt, synthetic construct
  source 1..20: mol_type = other RNA
ctctgcgtggctgcggtggc

SEQ ID NO: 1938 - RNA, 20 nt, synthetic construct
  source 1..20: mol_type = other RNA
gccaccgccaccttccgccg

SEQ ID NO: 1939 - RNA, 20 nt, synthetic construct
  source 1..20: mol_type = other RNA
tgccccaccggcgctggtgc

SEQ ID NO: 1940 - RNA, 20 nt, synthetic construct
  source 1..20: mol_type = other RNA
ggcacccactgctctgcgtg

SEQ ID NO: 1941 - RNA, 20 nt, synthetic construct
  source 1..20: mol_type = other RNA
atctcccggcccccaggcgt

SEQ ID NO: 1942 - RNA, 20 nt, synthetic construct
  source 1..20: mol_type = other RNA
ccggtgggctcccgttctct

SEQ ID NO: 1943 - RNA, 20 nt, synthetic construct
  source 1..20: mol_type = other RNA
ggagaccccggaaatgctaa

SEQ ID NO: 1944 - RNA, 20 nt, synthetic construct
  source 1..20: mol_type = other RNA
ggtgccaggcaacggcgttg

SEQ ID NO: 1945 - RNA, 20 nt, synthetic construct
  source 1..20: mol_type = other RNA
gctccccagagacatcacgg

SEQ ID NO: 1946 - RNA, 20 nt, synthetic construct
  source 1..20: mol_type = other RNA
aggccgcacatgtggccacc

SEQ ID NO: 1947 - RNA, 20 nt, synthetic construct
  source 1..20: mol_type = other RNA
tctggggagggcgaggccga

SEQ ID NO: 1948 - RNA, 20 nt, synthetic construct
  source 1..20: mol_type = other RNA
ttggagggagaagtacaggg

SEQ ID NO: 1949 - RNA, 20 nt, synthetic construct
  source 1..20: mol_type = other RNA
ttgctgctactgtgccccac

SEQ ID NO: 1950 - RNA, 20 nt, synthetic construct
  source 1..20: mol_type = other RNA
tgggtgccaggcaacggcgt

SEQ ID NO: 1951 - RNA, 20 nt, synthetic construct
  source 1..20: mol_type = other RNA
ggtcacaggaggagggccca

SEQ ID NO: 1952 - RNA, 20 nt, synthetic construct
  source 1..20: mol_type = other RNA
gcgtgatctcccggccccca

SEQ ID NO: 1953 - RNA, 20 nt, synthetic construct
  source 1..20: mol_type = other RNA
tggccaccgccaccttccgc

SEQ ID NO: 1954 - RNA, 20 nt, synthetic construct
  source 1..20: mol_type = other RNA
gagtggggattaagaggggg

SEQ ID NO: 1955 - RNA, 20 nt, synthetic construct
  source 1..20: mol_type = other RNA
atgaggccgcacatgtggcc

SEQ ID NO: 1956 - RNA, 20 nt, synthetic construct
  source 1..20: mol_type = other RNA
tccttcccgaggccgcgcgc

SEQ ID NO: 1957 - RNA, 20 nt, synthetic construct
  source 1..20: mol_type = other RNA
atgctcttcgggggtcttct

SEQ ID NO: 1958 - RNA, 20 nt, synthetic construct
  source 1..20: mol_type = other RNA
gaggccagggagggaaggga

SEQ ID NO: 1959 - RNA, 20 nt, synthetic construct
  source 1..20: mol_type = other RNA
ttgttggagggagaagtaca

SEQ ID NO: 1960 - RNA, 20 nt, synthetic construct
  source 1..20: mol_type = other RNA
agcccaaggagcagagggct

SEQ ID NO: 1961 - RNA, 20 nt, synthetic construct
  source 1..20: mol_type = other RNA
agcgtcatttgacgctgtct

SEQ ID NO: 1962 - RNA, 20 nt, synthetic construct
  source 1..20: mol_type = other RNA
ttgccgccgctgctgctgct

SEQ ID NO: 1963 - RNA, 20 nt, synthetic construct
  source 1..20: mol_type = other RNA
gcaccccgcctgaggaggat

SEQ ID NO: 1964 - RNA, 20 nt, synthetic construct
  source 1..20: mol_type = other RNA
gacgcgcaggctgccggtgg

SEQ ID NO: 1965 - RNA, 20 nt, synthetic construct
  source 1..20: mol_type = other RNA
ggctcccgttctctctctct

SEQ ID NO: 1966 - RNA, 20 nt, synthetic construct
  source 1..20: mol_type = other RNA
gttaatattgttggagggag

SEQ ID NO: 1967 - RNA, 20 nt, synthetic construct
  source 1..20: mol_type = other RNA
gagattatgaagagctgatg

SEQ ID NO: 1968 - RNA, 20 nt, synthetic construct
  source 1..20: mol_type = other RNA
ctcatctagccgtctggtgg

SEQ ID NO: 1969 - RNA, 20 nt, synthetic construct
  source 1..20: mol_type = other RNA
ctttggggttggggtgatgc

SEQ ID NO: 1970 - RNA, 20 nt, synthetic construct
  source 1..20: mol_type = other RNA
ctcttcgggggtcttctctg

SEQ ID NO: 1971 - RNA, 20 nt, synthetic construct
  source 1..20: mol_type = other RNA
gggctcagcacgcctctgag

SEQ ID NO: 1972 - RNA, 20 nt, synthetic construct
  source 1..20: mol_type = other RNA
gatggagtgcaaagtttagg

SEQ ID NO: 1973 - RNA, 20 nt, synthetic construct
  source 1..20: mol_type = other RNA
gagggagaagtacaggggtg

SEQ ID NO: 1974 - RNA, 20 nt, synthetic construct
  source 1..20: mol_type = other RNA
aggctagaggactgagccag

SEQ ID NO: 1975 - RNA, 20 nt, synthetic construct
  source 1..20: mol_type = other RNA
ccggggcccgttaatgttta

SEQ ID NO: 1976 - RNA, 89 nt, synthetic construct
  source 1..89: mol_type = other RNA
acagcttatttggaagctgaaatgtgaggtttataacactcacaagaatcctgaaaaaggatgccaaacgacagcccagtcctacccca

SEQ ID NO: 1977 - RNA, 89 nt, synthetic construct
  source 1..89: mol_type = other RNA
acagcttatttggaagctgaaatgtgaggtttataacactcacaagaatcctgaaaaaggatgccaaacttcagggcttggggctggtg

SEQ ID NO: 1978 - RNA, 89 nt, synthetic construct
  source 1..89: mol_type = other RNA
acagcttatttggaagctgaaatgtgaggtttataacactcacaagaatcctgaaaaaggatgccaaaccctttactccaaacaccccc

SEQ ID NO: 1979 - RNA, 89 nt, synthetic construct
  source 1..89: mol_type = other RNA
acagcttatttggaagctgaaatgtgaggtttataacactcacaagaatcctgaaaaaggatgccaaacccccccacccctcatcataa

SEQ ID NO: 1980 - RNA, 89 nt, synthetic construct
  source 1..89: mol_type = other RNA
acagcttatttggaagctgaaatgtgaggtttataacactcacaagaatcctgaaaaaggatgccaaacttcagtctggtgggttttct

SEQ ID NO: 1981 - RNA, 89 nt, synthetic construct
  source 1..89: mol_type = other RNA
acagcttatttggaagctgaaatgtgaggtttataacactcacaagaatcctgaaaaaggatgccaaactcacttgcccaaagctacac

SEQ ID NO: 1982 - RNA, 89 nt, synthetic construct
  source 1..89: mol_type = other RNA
acagcttatttggaagctgaaatgtgaggtttataacactcacaagaatcctgaaaaaggatgccaaacgtgggttttctgctccatcc

SEQ ID NO: 1983 - RNA, 89 nt, synthetic construct
  source 1..89: mol_type = other RNA
acagcttatttggaagctgaaatgtgaggtttataacactcacaagaatcctgaaaaaggatgccaaacccggagccactgatgcctgg

SEQ ID NO: 1984 - RNA, 89 nt, synthetic construct
  source 1..89: mol_type = other RNA
acagcttatttggaagctgaaatgtgaggtttataacactcacaagaatcctgaaaaaggatgccaaacgactcagtctcctagggatt

SEQ ID NO: 1985 - RNA, 89 nt, synthetic construct
  source 1..89: mol_type = other RNA
acagcttatttggaagctgaaatgtgaggtttataacactcacaagaatcctgaaaaaggatgccaaacgcctatgtccaagccatttc

SEQ ID NO: 1986 - RNA, 89 nt, synthetic construct
  source 1..89: mol_type = other RNA
acagcttatttggaagctgaaatgtgaggtttataacactcacaagaatcctgaaaaaggatgccaaaccctcaggccctcatctccac

SEQ ID NO: 1987 - RNA, 89 nt, synthetic construct
  source 1..89: mol_type = other RNA
acagcttatttggaagctgaaatgtgaggtttataacactcacaagaatcctgaaaaaggatgccaaactccaagccatttcccctctc

SEQ ID NO: 1988 - RNA, 89 nt, synthetic construct
  source 1..89: mol_type = other RNA
acagcttatttggaagctgaaatgtgaggtttataacactcacaagaatcctgaaaaaggatgccaaacaaaggctgagatgggcccga

SEQ ID NO: 1989 - RNA, 89 nt, synthetic construct
  source 1..89: mol_type = other RNA
acagcttatttggaagctgaaatgtgaggtttataacactcacaagaatcctgaaaaaggatgccaaacaaattccagtgtgaaaggct

SEQ ID NO: 1990 - RNA, 89 nt, synthetic construct
  source 1..89: mol_type = other RNA
acagcttatttggaagctgaaatgtgaggtttataacactcacaagaatcctgaaaaaggatgccaaacgagatgatataaaacaggtc

SEQ ID NO: 1991 - RNA, 89 nt, synthetic construct
  source 1..89: mol_type = other RNA
acagcttatttggaagctgaaatgtgaggtttataacactcacaagaatcctgaaaaaggatgccaaacgggaggggaaagaggagggg

SEQ ID NO: 1992 - RNA, 89 nt, synthetic construct
  source 1..89: mol_type = other RNA
acagcttatttggaagctgaaatgtgaggtttataacactcacaagaatcctgaaaaaggatgccaaacaagaacatggaggcccggga

SEQ ID NO: 1993 - RNA, 89 nt, synthetic construct
  source 1..89: mol_type = other RNA
acagcttatttggaagctgaaatgtgaggtttataacactcacaagaatcctgaaaaaggatgccaaacgggctggtggagggaggggc

SEQ ID NO: 1994 - RNA, 89 nt, synthetic construct
  source 1..89: mol_type = other RNA
acagcttatttggaagctgaaatgtgaggtttataacactcacaagaatcctgaaaaaggatgccaaacatgcctggtcttctgtgcct

SEQ ID NO: 1995 - RNA, 89 nt, synthetic construct
  source 1..89: mol_type = other RNA
acagcttatttggaagctgaaatgtgaggtttataacactcacaagaatcctgaaaaaggatgccaaactgttcagggcttggggctgg

SEQ ID NO: 1996 - RNA, 89 nt, synthetic construct
  source 1..89: mol_type = other RNA
acagcttatttggaagctgaaatgtgaggtttataacactcacaagaatcctgaaaaaggatgccaaacctccaggtaatgccctctgg

SEQ ID NO: 1997 - RNA, 89 nt, synthetic construct
  source 1..89: mol_type = other RNA
acagcttatttggaagctgaaatgtgaggtttataacactcacaagaatcctgaaaaaggatgccaaacagggctccccaggcccaccc

SEQ ID NO: 1998 - RNA, 89 nt, synthetic construct
  source 1..89: mol_type = other RNA
acagcttatttggaagctgaaatgtgaggtttataacactcacaagaatcctgaaaaaggatgccaaacttggctggactggacggaga

SEQ ID NO: 1999 - RNA, 89 nt, synthetic construct
  source 1..89: mol_type = other RNA
acagcttatttggaagctgaaatgtgaggtttataacactcacaagaatcctgaaaaaggatgccaaacgagctaaggaagcctcggag

SEQ ID NO: 2000 - RNA, 89 nt, synthetic construct
  source 1..89: mol_type = other RNA
acagcttatttggaagctgaaatgtgaggtttataacactcacaagaatcctgaaaaaggatgccaaacccctctggggaggggaaaga

SEQ ID NO: 2001 - RNA, 89 nt, synthetic construct
  source 1..89: mol_type = other RNA
acagcttatttggaagctgaaatgtgaggtttataacactcacaagaatcctgaaaaaggatgccaaacctccaaacaccccccagccc

SEQ ID NO: 2002 - RNA, 89 nt, synthetic construct
  source 1..89: mol_type = other RNA
acagcttatttggaagctgaaatgtgaggtttataacactcacaagaatcctgaaaaaggatgccaaacgggagccagtcagctaggaa

SEQ ID NO: 2003 - RNA, 89 nt, synthetic construct
  source 1..89: mol_type = other RNA
acagcttatttggaagctgaaatgtgaggtttataacactcacaagaatcctgaaaaaggatgccaaacggcccgaggcccctggccta

SEQ ID NO: 2004 - RNA, 89 nt, synthetic construct
  source 1..89: mol_type = other RNA
acagcttatttggaagctgaaatgtgaggtttataacactcacaagaatcctgaaaaaggatgccaaacgaggcagctgctccaggtaa

SEQ ID NO: 2005 - RNA, 89 nt, synthetic construct
  source 1..89: mol_type = other RNA
acagcttatttggaagctgaaatgtgaggtttataacactcacaagaatcctgaaaaaggatgccaaacgagggaggggcctgaaattc

SEQ ID NO: 2006 - RNA, 89 nt, synthetic construct
  source 1..89: mol_type = other RNA
acagcttatttggaagctgaaatgtgaggtttataacactcacaagaatcctgaaaaaggatgccaaacgagagggccagaaatcaccc

SEQ ID NO: 2007 - RNA, 89 nt, synthetic construct
  source 1..89: mol_type = other RNA
acagcttatttggaagctgaaatgtgaggtttataacactcacaagaatcctgaaaaaggatgccaaacaagaagcccctcacccctct

SEQ ID NO: 2008 - RNA, 89 nt, synthetic construct
  source 1..89: mol_type = other RNA
acagcttatttggaagctgaaatgtgaggtttataacactcacaagaatcctgaaaaaggatgccaaacccccagacagggaaactgag

SEQ ID NO: 2009 - RNA, 89 nt, synthetic construct
  source 1..89: mol_type = other RNA
acagcttatttggaagctgaaatgtgaggtttataacactcacaagaatcctgaaaaaggatgccaaacgggctggaagtggctccaag

SEQ ID NO: 2010 - RNA, 89 nt, synthetic construct
  source 1..89: mol_type = other RNA
acagcttatttggaagctgaaatgtgaggtttataacactcacaagaatcctgaaaaaggatgccaaacctccaggctgtgttcagggc

SEQ ID NO: 2011 - RNA, 89 nt, synthetic construct
  source 1..89: mol_type = other RNA
acagcttatttggaagctgaaatgtgaggtttataacactcacaagaatcctgaaaaaggatgccaaacgtcttctgtgcctttactcc

SEQ ID NO: 2012 - RNA, 89 nt, synthetic construct
  source 1..89: mol_type = other RNA
acagcttatttggaagctgaaatgtgaggtttataacactcacaagaatcctgaaaaaggatgccaaaccacagggggtggggctggaa

SEQ ID NO: 2013 - RNA, 89 nt, synthetic construct
  source 1..89: mol_type = other RNA
acagcttatttggaagctgaaatgtgaggtttataacactcacaagaatcctgaaaaaggatgccaaacgactggacggagatcagtcc

SEQ ID NO: 2014 - RNA, 89 nt, synthetic construct
  source 1..89: mol_type = other RNA
acagcttatttggaagctgaaatgtgaggtttataacactcacaagaatcctgaaaaaggatgccaaacgacgggtgccccccacccct

SEQ ID NO: 2015 - RNA, 89 nt, synthetic construct
  source 1..89: mol_type = other RNA
acagcttatttggaagctgaaatgtgaggtttataacactcacaagaatcctgaaaaaggatgccaaactgtccaagccatttcccctc

SEQ ID NO: 2016 - RNA, 89 nt, synthetic construct
  source 1..89: mol_type = other RNA
acagcttatttggaagctgaaatgtgaggtttataacactcacaagaatcctgaaaaaggatgccaaacagatgggcccgaggcccctg

SEQ ID NO: 2017 - RNA, 89 nt, synthetic construct
  source 1..89: mol_type = other RNA
acagcttatttggaagctgaaatgtgaggtttataacactcacaagaatcctgaaaaaggatgccaaacggtcctcagtgcctgctgcc

SEQ ID NO: 2018 - RNA, 89 nt, synthetic construct
  source 1..89: mol_type = other RNA
acagcttatttggaagctgaaatgtgaggtttataacactcacaagaatcctgaaaaaggatgccaaaccagggctggcgggacagcag

SEQ ID NO: 2019 - RNA, 89 nt, synthetic construct
  source 1..89: mol_type = other RNA
acagcttatttggaagctgaaatgtgaggtttataacactcacaagaatcctgaaaaaggatgccaaacccttgatgttcagtctggtg

SEQ ID NO: 2020 - RNA, 89 nt, synthetic construct
  source 1..89: mol_type = other RNA
acagcttatttggaagctgaaatgtgaggtttataacactcacaagaatcctgaaaaaggatgccaaacaggcctggagagggccagaa

SEQ ID NO: 2021 - RNA, 89 nt, synthetic construct
  source 1..89: mol_type = other RNA
acagcttatttggaagctgaaatgtgaggtttataacactcacaagaatcctgaaaaaggatgccaaacccctggagatgatataaaac

SEQ ID NO: 2022 - RNA, 89 nt, synthetic construct
  source 1..89: mol_type = other RNA
acagcttatttggaagctgaaatgtgaggtttataacactcacaagaatcctgaaaaaggatgccaaacacctgaagaacatggaggcc

SEQ ID NO: 2023 - RNA, 89 nt, synthetic construct
  source 1..89: mol_type = other RNA
acagcttatttggaagctgaaatgtgaggtttataacactcacaagaatcctgaaaaaggatgccaaaccctggtcttctgtgccttta

SEQ ID NO: 2024 - RNA, 89 nt, synthetic construct
  source 1..89: mol_type = other RNA
acagcttatttggaagctgaaatgtgaggtttataacactcacaagaatcctgaaaaaggatgccaaacacctttgcccagcgccctgg

SEQ ID NO: 2025 - RNA, 89 nt, synthetic construct
  source 1..89: mol_type = other RNA
acagcttatttggaagctgaaatgtgaggtttataacactcacaagaatcctgaaaaaggatgccaaaccccaaagctacacagggggt

SEQ ID NO: 2026 - RNA, 89 nt, synthetic construct
  source 1..89: mol_type = other RNA
acagcttatttggaagctgaaatgtgaggtttataacactcacaagaatcctgaaaaaggatgccaaacgtggagggaggggcctgaaa

SEQ ID NO: 2027 - RNA, 89 nt, synthetic construct
  source 1..89: mol_type = other RNA
acagcttatttggaagctgaaatgtgaggtttataacactcacaagaatcctgaaaaaggatgccaaactgcctttactccaaacaccc

SEQ ID NO: 2028 - RNA, 89 nt, synthetic construct
  source 1..89: mol_type = other RNA
acagcttatttggaagctgaaatgtgaggtttataacactcacaagaatcctgaaaaaggatgccaaacctccatcccacccacctccc

SEQ ID NO: 2029 - RNA, 89 nt, synthetic construct
  source 1..89: mol_type = other RNA
acagcttatttggaagctgaaatgtgaggtttataacactcacaagaatcctgaaaaaggatgccaaacatgttcagtctggtgggttt

SEQ ID NO: 2030 - RNA, 89 nt, synthetic construct
  source 1..89: mol_type = other RNA
acagcttatttggaagctgaaatgtgaggtttataacactcacaagaatcctgaaaaaggatgccaaacctagagctaaggaagcctcg

SEQ ID NO: 2031 - RNA, 89 nt, synthetic construct
  source 1..89: mol_type = other RNA
acagcttatttggaagctgaaatgtgaggtttataacactcacaagaatcctgaaaaaggatgccaaacggaaggaatgagggctcccc

SEQ ID NO: 2032 - RNA, 89 nt, synthetic construct
  source 1..89: mol_type = other RNA
acagcttatttggaagctgaaatgtgaggtttataacactcacaagaatcctgaaaaaggatgccaaacggctgcagggctggcgggac

SEQ ID NO: 2033 - RNA, 89 nt, synthetic construct
  source 1..89: mol_type = other RNA
acagcttatttggaagctgaaatgtgaggtttataacactcacaagaatcctgaaaaaggatgccaaacatgccctctggggaggggaa

SEQ ID NO: 2034 - RNA, 89 nt, synthetic construct
  source 1..89: mol_type = other RNA
acagcttatttggaagctgaaatgtgaggtttataacactcacaagaatcctgaaaaaggatgccaaacaaacaggtcagaaccctcct

SEQ ID NO: 2035 - RNA, 89 nt, synthetic construct
  source 1..89: mol_type = other RNA
acagcttatttggaagctgaaatgtgaggtttataacactcacaagaatcctgaaaaaggatgccaaacgggctggaggaagccttaga

SEQ ID NO: 2036 - RNA, 89 nt, synthetic construct
  source 1..89: mol_type = other RNA
acagcttatttggaagctgaaatgtgaggtttataacactcacaagaatcctgaaaaaggatgccaaacttctcaagtctgaagaagcc

SEQ ID NO: 2037 - RNA, 89 nt, synthetic construct
  source 1..89: mol_type = other RNA
acagcttatttggaagctgaaatgtgaggtttataacactcacaagaatcctgaaaaaggatgccaaacagctcatctgggctgcaggg

SEQ ID NO: 2038 - RNA, 89 nt, synthetic construct
  source 1..89: mol_type = other RNA
acagcttatttggaagctgaaatgtgaggtttataacactcacaagaatcctgaaaaaggatgccaaacgggatttcccaactctcccg

SEQ ID NO: 2039 - RNA, 89 nt, synthetic construct
  source 1..89: mol_type = other RNA
acagcttatttggaagctgaaatgtgaggtttataacactcacaagaatcctgaaaaaggatgccaaacgacggagatcagtccagacc

SEQ ID NO: 2040 - RNA, 89 nt, synthetic construct
  source 1..89: mol_type = other RNA
acagcttatttggaagctgaaatgtgaggtttataacactcacaagaatcctgaaaaaggatgccaaactgaaaggctgagatgggccc

SEQ ID NO: 2041 - RNA, 89 nt, synthetic construct
  source 1..89: mol_type = other RNA
acagcttatttggaagctgaaatgtgaggtttataacactcacaagaatcctgaaaaaggatgccaaaccctgtctgctcagttcatcc

SEQ ID NO: 2042 - RNA, 89 nt, synthetic construct
  source 1..89: mol_type = other RNA
acagcttatttggaagctgaaatgtgaggtttataacactcacaagaatcctgaaaaaggatgccaaaccaggttcccccctcattctt

SEQ ID NO: 2043 - RNA, 89 nt, synthetic construct
  source 1..89: mol_type = other RNA
acagcttatttggaagctgaaatgtgaggtttataacactcacaagaatcctgaaaaaggatgccaaacgtcagcaggtgacctttgcc

SEQ ID NO: 2044 - RNA, 89 nt, synthetic construct
  source 1..89: mol_type = other RNA
acagcttatttggaagctgaaatgtgaggtttataacactcacaagaatcctgaaaaaggatgccaaacgaggaagccttagacagccc

SEQ ID NO: 2045 - RNA, 89 nt, synthetic construct
  source 1..89: mol_type = other RNA
acagcttatttggaagctgaaatgtgaggtttataacactcacaagaatcctgaaaaaggatgccaaacctgcatctggacaccctgcc

SEQ ID NO: 2046 - RNA, 89 nt, synthetic construct
  source 1..89: mol_type = other RNA
acagcttatttggaagctgaaatgtgaggtttataacactcacaagaatcctgaaaaaggatgccaaaccccagcgccctgggtcctca

SEQ ID NO: 2047 - RNA, 89 nt, synthetic construct
  source 1..89: mol_type = other RNA
acagcttatttggaagctgaaatgtgaggtttataacactcacaagaatcctgaaaaaggatgccaaaccccagcccagccagcaagcc

SEQ ID NO: 2048 - RNA, 89 nt, synthetic construct
  source 1..89: mol_type = other RNA
acagcttatttggaagctgaaatgtgaggtttataacactcacaagaatcctgaaaaaggatgccaaacggttttctgctccatcccac

SEQ ID NO: 2049 - RNA, 89 nt, synthetic construct
  source 1..89: mol_type = other RNA
acagcttatttggaagctgaaatgtgaggtttataacactcacaagaatcctgaaaaaggatgccaaactaaaacaggtcagaaccctc

SEQ ID NO: 2050 - RNA, 89 nt, synthetic construct
  source 1..89: mol_type = other RNA
acagcttatttggaagctgaaatgtgaggtttataacactcacaagaatcctgaaaaaggatgccaaacctcagttcatccctagaggc

SEQ ID NO: 2051 - RNA, 89 nt, synthetic construct
  source 1..89: mol_type = other RNA
acagcttatttggaagctgaaatgtgaggtttataacactcacaagaatcctgaaaaaggatgccaaacgacaccctgcctcaggccct

SEQ ID NO: 2052 - RNA, 89 nt, synthetic construct
  source 1..89: mol_type = other RNA
acagcttatttggaagctgaaatgtgaggtttataacactcacaagaatcctgaaaaaggatgccaaacgcgggacagcagcgtggact

SEQ ID NO: 2053 - RNA, 89 nt, synthetic construct
  source 1..89: mol_type = other RNA
acagcttatttggaagctgaaatgtgaggtttataacactcacaagaatcctgaaaaaggatgccaaacaagaggggcaagaggagctc

SEQ ID NO: 2054 - RNA, 89 nt, synthetic construct
  source 1..89: mol_type = other RNA
acagcttatttggaagctgaaatgtgaggtttataacactcacaagaatcctgaaaaaggatgccaaaccatctggacaccctgcctca

SEQ ID NO: 2055 - RNA, 89 nt, synthetic construct
  source 1..89: mol_type = other RNA
acagcttatttggaagctgaaatgtgaggtttataacactcacaagaatcctgaaaaaggatgccaaacgaggcccgggaggggtgtca

SEQ ID NO: 2056 - RNA, 89 nt, synthetic construct
  source 1..89: mol_type = other RNA
acagcttatttggaagctgaaatgtgaggtttataacactcacaagaatcctgaaaaaggatgccaaaccctgctgccctggagatgat

SEQ ID NO: 2057 - RNA, 89 nt, synthetic construct
  source 1..89: mol_type = other RNA
acagcttatttggaagctgaaatgtgaggtttataacactcacaagaatcctgaaaaaggatgccaaacaggaagcctcggagctggac

SEQ ID NO: 2058 - RNA, 89 nt, synthetic construct
  source 1..89: mol_type = other RNA
acagcttatttggaagctgaaatgtgaggtttataacactcacaagaatcctgaaaaaggatgccaaactctgctcagttcatccctag

SEQ ID NO: 2059 - RNA, 89 nt, synthetic construct
  source 1..89: mol_type = other RNA
acagcttatttggaagctgaaatgtgaggtttataacactcacaagaatcctgaaaaaggatgccaaacgaagtggctccaagtgcagg

SEQ ID NO: 2060 - RNA, 89 nt, synthetic construct
  source 1..89: mol_type = other RNA
acagcttatttggaagctgaaatgtgaggtttataacactcacaagaatcctgaaaaaggatgccaaacgctggactggacggagatca

SEQ ID NO: 2061 - RNA, 89 nt, synthetic construct
  source 1..89: mol_type = other RNA
acagcttatttggaagctgaaatgtgaggtttataacactcacaagaatcctgaaaaaggatgccaaacgagaagcacttgctagagct

SEQ ID NO: 2062 - RNA, 89 nt, synthetic construct
  source 1..89: mol_type = other RNA
acagcttatttggaagctgaaatgtgaggtttataacactcacaagaatcctgaaaaaggatgccaaacctgccctggagatgatataa

SEQ ID NO: 2063 - RNA, 89 nt, synthetic construct
  source 1..89: mol_type = other RNA
acagcttatttggaagctgaaatgtgaggtttataacactcacaagaatcctgaaaaaggatgccaaacatataaaacaggtcagaacc

SEQ ID NO: 2064 - RNA, 89 nt, synthetic construct
  source 1..89: mol_type = other RNA
acagcttatttggaagctgaaatgtgaggtttataacactcacaagaatcctgaaaaaggatgccaaacgctccaagtgcaggttcccc

SEQ ID NO: 2065 - RNA, 89 nt, synthetic construct
  source 1..89: mol_type = other RNA
acagcttatttggaagctgaaatgtgaggtttataacactcacaagaatcctgaaaaaggatgccaaacggctgggcagggagctcctc

SEQ ID NO: 2066 - RNA, 89 nt, synthetic construct
  source 1..89: mol_type = other RNA
acagcttatttggaagctgaaatgtgaggtttataacactcacaagaatcctgaaaaaggatgccaaacgacataggccaggggcctcg

SEQ ID NO: 2067 - RNA, 89 nt, synthetic construct
  source 1..89: mol_type = other RNA
acagcttatttggaagctgaaatgtgaggtttataacactcacaagaatcctgaaaaaggatgccaaacggcctggggagccctcattc

SEQ ID NO: 2068 - RNA, 89 nt, synthetic construct
  source 1..89: mol_type = other RNA
acagcttatttggaagctgaaatgtgaggtttataacactcacaagaatcctgaaaaaggatgccaaacggctggggggtgtttggagt

SEQ ID NO: 2069 - RNA, 89 nt, synthetic construct
  source 1..89: mol_type = other RNA
acagcttatttggaagctgaaatgtgaggtttataacactcacaagaatcctgaaaaaggatgccaaacggtgggatggagcagaaaac

SEQ ID NO: 2070 - RNA, 89 nt, synthetic construct
  source 1..89: mol_type = other RNA
acagcttatttggaagctgaaatgtgaggtttataacactcacaagaatcctgaaaaaggatgccaaacgcttggacataggccagggg

SEQ ID NO: 2071 - RNA, 89 nt, synthetic construct
  source 1..89: mol_type = other RNA
acagcttatttggaagctgaaatgtgaggtttataacactcacaagaatcctgaaaaaggatgccaaacagggcctgaggcagggtgtc

SEQ ID NO: 2072 - RNA, 89 nt, synthetic construct
  source 1..89: mol_type = other RNA
acagcttatttggaagctgaaatgtgaggtttataacactcacaagaatcctgaaaaaggatgccaaacaggcagggtgtccagatgca

SEQ ID NO: 2073 - RNA, 89 nt, synthetic construct
  source 1..89: mol_type = other RNA
acagcttatttggaagctgaaatgtgaggtttataacactcacaagaatcctgaaaaaggatgccaaactcccgccagccctgcagccc

SEQ ID NO: 2074 - RNA, 89 nt, synthetic construct
  source 1..89: mol_type = other RNA
acagcttatttggaagctgaaatgtgaggtttataacactcacaagaatcctgaaaaaggatgccaaaccccctcttcatcctcctccc

SEQ ID NO: 2075 - RNA, 89 nt, synthetic construct
  source 1..89: mol_type = other RNA
acagcttatttggaagctgaaatgtgaggtttataacactcacaagaatcctgaaaaaggatgccaaacaacatcaaggcacctgcggt

SEQ ID NO: 2076 - RNA, 89 nt, synthetic construct
  source 1..89: mol_type = other RNA
acagcttatttggaagctgaaatgtgaggtttataacactcacaagaatcctgaaaaaggatgccaaacagctcaggaactgggggtgg

SEQ ID NO: 2077 - RNA, 89 nt, synthetic construct
  source 1..89: mol_type = other RNA
acagcttatttggaagctgaaatgtgaggtttataacactcacaagaatcctgaaaaaggatgccaaacttcttcaggttatgatgagg

SEQ ID NO: 2078 - RNA, 89 nt, synthetic construct
  source 1..89: mol_type = other RNA
acagcttatttggaagctgaaatgtgaggtttataacactcacaagaatcctgaaaaaggatgccaaacgctttgggcaagtgacaccc

SEQ ID NO: 2079 - RNA, 89 nt, synthetic construct
  source 1..89: mol_type = other RNA
acagcttatttggaagctgaaatgtgaggtttataacactcacaagaatcctgaaaaaggatgccaaacaggggggaacctgcacttgg

SEQ ID NO: 2080 - RNA, 89 nt, synthetic construct
  source 1..89: mol_type = other RNA
acagcttatttggaagctgaaatgtgaggtttataacactcacaagaatcctgaaaaaggatgccaaacgcttgggctggggggtgttt

SEQ ID NO: 2081 - RNA, 89 nt, synthetic construct
  source 1..89: mol_type = other RNA
acagcttatttggaagctgaaatgtgaggtttataacactcacaagaatcctgaaaaaggatgccaaacaactgagcagacaggcagga

SEQ ID NO: 2082 - RNA, 89 nt, synthetic construct
  source 1..89: mol_type = other RNA
acagcttatttggaagctgaaatgtgaggtttataacactcacaagaatcctgaaaaaggatgccaaactgtgtctttgggtgatttct

SEQ ID NO: 2083 - RNA, 89 nt, synthetic construct
  source 1..89: mol_type = other RNA
acagcttatttggaagctgaaatgtgaggtttataacactcacaagaatcctgaaaaaggatgccaaactgatgaggggtggggggcac

SEQ ID NO: 2084 - RNA, 89 nt, synthetic construct
  source 1..89: mol_type = other RNA
acagcttatttggaagctgaaatgtgaggtttataacactcacaagaatcctgaaaaaggatgccaaacggcagggagctcctcttgcc

SEQ ID NO: 2085 - RNA, 89 nt, synthetic construct
  source 1..89: mol_type = other RNA
acagcttatttggaagctgaaatgtgaggtttataacactcacaagaatcctgaaaaaggatgccaaacaggggtggggggcacccgtc

SEQ ID NO: 2086 - RNA, 89 nt, synthetic construct
  source 1..89: mol_type = other RNA
acagcttatttggaagctgaaatgtgaggtttataacactcacaagaatcctgaaaaaggatgccaaaccctggagcagctgcctctag

SEQ ID NO: 2087 - RNA, 89 nt, synthetic construct
  source 1..89: mol_type = other RNA
acagcttatttggaagctgaaatgtgaggtttataacactcacaagaatcctgaaaaaggatgccaaacgggatgaactgagcagacag

SEQ ID NO: 2088 - RNA, 89 nt, synthetic construct
  source 1..89: mol_type = other RNA
acagcttatttggaagctgaaatgtgaggtttataacactcacaagaatcctgaaaaaggatgccaaacaggcttcctccagccctaag

SEQ ID NO: 2089 - RNA, 89 nt, synthetic construct
  source 1..89: mol_type = other RNA
acagcttatttggaagctgaaatgtgaggtttataacactcacaagaatcctgaaaaaggatgccaaacgagatgagggcctgaggcag

SEQ ID NO: 2090 - RNA, 89 nt, synthetic construct
  source 1..89: mol_type = other RNA
acagcttatttggaagctgaaatgtgaggtttataacactcacaagaatcctgaaaaaggatgccaaacggatggagcagaaaacccac

SEQ ID NO: 2091 - RNA, 89 nt, synthetic construct
  source 1..89: mol_type = other RNA
acagcttatttggaagctgaaatgtgaggtttataacactcacaagaatcctgaaaaaggatgccaaacaagaatgaggggggaacctg

SEQ ID NO: 2092 - RNA, 89 nt, synthetic construct
  source 1..89: mol_type = other RNA
acagcttatttggaagctgaaatgtgaggtttataacactcacaagaatcctgaaaaaggatgccaaactttggagtaaaggcacagaa

SEQ ID NO: 2093 - RNA, 89 nt, synthetic construct
  source 1..89: mol_type = other RNA
acagcttatttggaagctgaaatgtgaggtttataacactcacaagaatcctgaaaaaggatgccaaacgagtagaggggtgaggggct

SEQ ID NO: 2094 - RNA, 89 nt, synthetic construct
  source 1..89: mol_type = other RNA
acagcttatttggaagctgaaatgtgaggtttataacactcacaagaatcctgaaaaaggatgccaaacacctgttttatatcatctcc

SEQ ID NO: 2095 - RNA, 89 nt, synthetic construct
  source 1..89: mol_type = other RNA
acagcttatttggaagctgaaatgtgaggtttataacactcacaagaatcctgaaaaaggatgccaaacgtgagaggggaaatggcttg

SEQ ID NO: 2096 - RNA, 89 nt, synthetic construct
  source 1..89: mol_type = other RNA
acagcttatttggaagctgaaatgtgaggtttataacactcacaagaatcctgaaaaaggatgccaaactgtagctttgggcaagtgac

SEQ ID NO: 2097 - RNA, 89 nt, synthetic construct
  source 1..89: mol_type = other RNA
acagcttatttggaagctgaaatgtgaggtttataacactcacaagaatcctgaaaaaggatgccaaactgtctttgggtgatttctgg

SEQ ID NO: 2098 - RNA, 89 nt, synthetic construct
  source 1..89: mol_type = other RNA
acagcttatttggaagctgaaatgtgaggtttataacactcacaagaatcctgaaaaaggatgccaaactatcatctccagggcagcag

SEQ ID NO: 2099 - RNA, 89 nt, synthetic construct
  source 1..89: mol_type = other RNA
acagcttatttggaagctgaaatgtgaggtttataacactcacaagaatcctgaaaaaggatgccaaacgagcagaaaacccaccagac

SEQ ID NO: 2100 - RNA, 89 nt, synthetic construct
  source 1..89: mol_type = other RNA
acagcttatttggaagctgaaatgtgaggtttataacactcacaagaatcctgaaaaaggatgccaaacggagactgagtccacgctgc

SEQ ID NO: 2101 - RNA, 89 nt, synthetic construct
  source 1..89: mol_type = other RNA
acagcttatttggaagctgaaatgtgaggtttataacactcacaagaatcctgaaaaaggatgccaaaccagcccagatgagctcagga

SEQ ID NO: 2102 - RNA, 89 nt, synthetic construct
  source 1..89: mol_type = other RNA
acagcttatttggaagctgaaatgtgaggtttataacactcacaagaatcctgaaaaaggatgccaaacggtggcttgggctggggggt

SEQ ID NO: 2103 - RNA, 89 nt, synthetic construct
  source 1..89: mol_type = other RNA
acagcttatttggaagctgaaatgtgaggtttataacactcacaagaatcctgaaaaaggatgccaaacaggggcttcttcagacttga

SEQ ID NO: 2104 - RNA, 89 nt, synthetic construct
  source 1..89: mol_type = other RNA
acagcttatttggaagctgaaatgtgaggtttataacactcacaagaatcctgaaaaaggatgccaaaccacttggagccacttccagc

SEQ ID NO: 2105 - RNA, 89 nt, synthetic construct
  source 1..89: mol_type = other RNA
acagcttatttggaagctgaaatgtgaggtttataacactcacaagaatcctgaaaaaggatgccaaaccagcaagcgggcgggagagt

SEQ ID NO: 2106 - RNA, 89 nt, synthetic construct
  source 1..89: mol_type = other RNA
acagcttatttggaagctgaaatgtgaggtttataacactcacaagaatcctgaaaaaggatgccaaacggcaaaggtcacctgctgac

SEQ ID NO: 2107 - RNA, 89 nt, synthetic construct
  source 1..89: mol_type = other RNA
acagcttatttggaagctgaaatgtgaggtttataacactcacaagaatcctgaaaaaggatgccaaactctttgggtgatttctggcc

SEQ ID NO: 2108 - RNA, 89 nt, synthetic construct
  source 1..89: mol_type = other RNA
acagcttatttggaagctgaaatgtgaggtttataacactcacaagaatcctgaaaaaggatgccaaactcatctccagggcagcaggc

SEQ ID NO: 2109 - RNA, 89 nt, synthetic construct
  source 1..89: mol_type = other RNA
acagcttatttggaagctgaaatgtgaggtttataacactcacaagaatcctgaaaaaggatgccaaacagcagacaggcaggagggtt

SEQ ID NO: 2110 - RNA, 89 nt, synthetic construct
  source 1..89: mol_type = other RNA
acagcttatttggaagctgaaatgtgaggtttataacactcacaagaatcctgaaaaaggatgccaaacaggacccagggcgctgggca

SEQ ID NO: 2111 - RNA, 89 nt, synthetic construct
  source 1..89: mol_type = other RNA
acagcttatttggaagctgaaatgtgaggtttataacactcacaagaatcctgaaaaaggatgccaaacgggggtgtttggagtaaagg

SEQ ID NO: 2112 - RNA, 89 nt, synthetic construct
  source 1..89: mol_type = other RNA
acagcttatttggaagctgaaatgtgaggtttataacactcacaagaatcctgaaaaaggatgccaaacgggtaggactgggctgtcta

SEQ ID NO: 2113 - RNA, 89 nt, synthetic construct
  source 1..89: mol_type = other RNA
acagcttatttggaagctgaaatgtgaggtttataacactcacaagaatcctgaaaaaggatgccaaacggtgatttctggccctctcc

SEQ ID NO: 2114 - RNA, 89 nt, synthetic construct
  source 1..89: mol_type = other RNA
acagcttatttggaagctgaaatgtgaggtttataacactcacaagaatcctgaaaaaggatgccaaacgagcagctgcctctagggat

SEQ ID NO: 2115 - RNA, 89 nt, synthetic construct
  source 1..89: mol_type = other RNA
acagcttatttggaagctgaaatgtgaggtttataacactcacaagaatcctgaaaaaggatgccaaacctgtgtgtctttgggtgatt

SEQ ID NO: 2116 - RNA, 89 nt, synthetic construct
  source 1..89: mol_type = other RNA
acagcttatttggaagctgaaatgtgaggtttataacactcacaagaatcctgaaaaaggatgccaaacctgaccagtggagatgaggg

SEQ ID NO: 2117 - RNA, 89 nt, synthetic construct
  source 1..89: mol_type = other RNA
acagcttatttggaagctgaaatgtgaggtttataacactcacaagaatcctgaaaaaggatgccaaacatgaggggtggggggcaccc

SEQ ID NO: 2118 - RNA, 89 nt, synthetic construct
  source 1..89: mol_type = other RNA
acagcttatttggaagctgaaatgtgaggtttataacactcacaagaatcctgaaaaaggatgccaaactctaaggcttcctccagccc

SEQ ID NO: 2119 - RNA, 89 nt, synthetic construct
  source 1..89: mol_type = other RNA
acagcttatttggaagctgaaatgtgaggtttataacactcacaagaatcctgaaaaaggatgccaaacgaatttcaggcccctccctc

SEQ ID NO: 2120 - RNA, 89 nt, synthetic construct
  source 1..89: mol_type = other RNA
acagcttatttggaagctgaaatgtgaggtttataacactcacaagaatcctgaaaaaggatgccaaacagcctgaagaatgagggggg

SEQ ID NO: 2121 - RNA, 89 nt, synthetic construct
  source 1..89: mol_type = other RNA
acagcttatttggaagctgaaatgtgaggtttataacactcacaagaatcctgaaaaaggatgccaaacgggggcacccgtccagctcc

SEQ ID NO: 2122 - RNA, 89 nt, synthetic construct
  source 1..89: mol_type = other RNA
acagcttatttggaagctgaaatgtgaggtttataacactcacaagaatcctgaaaaaggatgccaaacaaggcacagaagaccaggca

SEQ ID NO: 2123 - RNA, 89 nt, synthetic construct
  source 1..89: mol_type = other RNA
acagcttatttggaagctgaaatgtgaggtttataacactcacaagaatcctgaaaaaggatgccaaacaccagtggagatgagggcct

SEQ ID NO: 2124 - RNA, 89 nt, synthetic construct
  source 1..89: mol_type = other RNA
acagcttatttggaagctgaaatgtgaggtttataacactcacaagaatcctgaaaaaggatgccaaacggctgtctaaggcttcctcc

SEQ ID NO: 2125 - RNA, 89 nt, synthetic construct
  source 1..89: mol_type = other RNA
acagcttatttggaagctgaaatgtgaggtttataacactcacaagaatcctgaaaaaggatgccaaacggggtgggcctggggagccc

SEQ ID NO: 2126 - RNA, 89 nt, synthetic construct
  source 1..89: mol_type = other RNA
acagcttatttggaagctgaaatgtgaggtttataacactcacaagaatcctgaaaaaggatgccaaactagctttgggcaagtgacac

SEQ ID NO: 2127 - RNA, 89 nt, synthetic construct
  source 1..89: mol_type = other RNA
acagcttatttggaagctgaaatgtgaggtttataacactcacaagaatcctgaaaaaggatgccaaacgagccacttccagccccacc

SEQ ID NO: 2128 - RNA, 89 nt, synthetic construct
  source 1..89: mol_type = other RNA
acagcttatttggaagctgaaatgtgaggtttataacactcacaagaatcctgaaaaaggatgccaaacatttctggccctctccaggc

SEQ ID NO: 2129 - RNA, 89 nt, synthetic construct
  source 1..89: mol_type = other RNA
acagcttatttggaagctgaaatgtgaggtttataacactcacaagaatcctgaaaaaggatgccaaacactggctccccagggagagg

SEQ ID NO: 2130 - RNA, 89 nt, synthetic construct
  source 1..89: mol_type = other RNA
acagcttatttggaagctgaaatgtgaggtttataacactcacaagaatcctgaaaaaggatgccaaacgccctctccaggcctcagtt

SEQ ID NO: 2131 - RNA, 89 nt, synthetic construct
  source 1..89: mol_type = other RNA
acagcttatttggaagctgaaatgtgaggtttataacactcacaagaatcctgaaaaaggatgccaaacggactgggctgtctaaggct

SEQ ID NO: 2132 - RNA, 89 nt, synthetic construct
  source 1..89: mol_type = other RNA
acagcttatttggaagctgaaatgtgaggtttataacactcacaagaatcctgaaaaaggatgccaaacctgtcccgccagccctgcag

SEQ ID NO: 2133 - RNA, 89 nt, synthetic construct
  source 1..89: mol_type = other RNA
acagcttatttggaagctgaaatgtgaggtttataacactcacaagaatcctgaaaaaggatgccaaacggcaagtgacacccctcccg

SEQ ID NO: 2134 - RNA, 89 nt, synthetic construct
  source 1..89: mol_type = other RNA
acagcttatttggaagctgaaatgtgaggtttataacactcacaagaatcctgaaaaaggatgccaaacagaacaagtgggtggcttgg

SEQ ID NO: 2135 - RNA, 89 nt, synthetic construct
  source 1..89: mol_type = other RNA
acagcttatttggaagctgaaatgtgaggtttataacactcacaagaatcctgaaaaaggatgccaaacaacacagcctggagtagagg

SEQ ID NO: 2136 - RNA, 89 nt, synthetic construct
  source 1..89: mol_type = other RNA
acagcttatttggaagctgaaatgtgaggtttataacactcacaagaatcctgaaaaaggatgccaaactctggggtaggactgggctg

SEQ ID NO: 2137 - RNA, 89 nt, synthetic construct
  source 1..89: mol_type = other RNA
acagcttatttggaagctgaaatgtgaggtttataacactcacaagaatcctgaaaaaggatgccaaacgaggggtgaggggcttcttc

SEQ ID NO: 2138 - RNA, 89 nt, synthetic construct
  source 1..89: mol_type = other RNA
acagcttatttggaagctgaaatgtgaggtttataacactcacaagaatcctgaaaaaggatgccaaaccggtctggactgatctccgt

SEQ ID NO: 2139 - RNA, 89 nt, synthetic construct
  source 1..89: mol_type = other RNA
acagcttatttggaagctgaaatgtgaggtttataacactcacaagaatcctgaaaaaggatgccaaacgctgggctgggcagggagct

SEQ ID NO: 2140 - RNA, 89 nt, synthetic construct
  source 1..89: mol_type = other RNA
acagcttatttggaagctgaaatgtgaggtttataacactcacaagaatcctgaaaaaggatgccaaacgggagccctcattccttcct

SEQ ID NO: 2141 - RNA, 89 nt, synthetic construct
  source 1..89: mol_type = other RNA
acagcttatttggaagctgaaatgtgaggtttataacactcacaagaatcctgaaaaaggatgccaaacgagtaaaggcacagaagacc

SEQ ID NO: 2142 - RNA, 89 nt, synthetic construct
  source 1..89: mol_type = other RNA
acagcttatttggaagctgaaatgtgaggtttataacactcacaagaatcctgaaaaaggatgccaaacgcaagtgcttctccaggctt

SEQ ID NO: 2143 - RNA, 89 nt, synthetic construct
  source 1..89: mol_type = other RNA
acagcttatttggaagctgaaatgtgaggtttataacactcacaagaatcctgaaaaaggatgccaaacagaggggaaatggcttggac

SEQ ID NO: 2144 - RNA, 89 nt, synthetic construct
  source 1..89: mol_type = other RNA
acagcttatttggaagctgaaatgtgaggtttataacactcacaagaatcctgaaaaaggatgccaaacagtccacgctgctgtcccgc

SEQ ID NO: 2145 - RNA, 89 nt, synthetic construct
  source 1..89: mol_type = other RNA
acagcttatttggaagctgaaatgtgaggtttataacactcacaagaatcctgaaaaaggatgccaaaccctctagggatgaactgagc

SEQ ID NO: 2146 - RNA, 89 nt, synthetic construct
  source 1..89: mol_type = other RNA
acagcttatttggaagctgaaatgtgaggtttataacactcacaagaatcctgaaaaaggatgccaaacggccaggggcctcgggccca

SEQ ID NO: 2147 - RNA, 89 nt, synthetic construct
  source 1..89: mol_type = other RNA
acagcttatttggaagctgaaatgtgaggtttataacactcacaagaatcctgaaaaaggatgccaaacctggctgggctgggcaggga

SEQ ID NO: 2148 - RNA, 89 nt, synthetic construct
  source 1..89: mol_type = other RNA
acagcttatttggaagctgaaatgtgaggtttataacactcacaagaatcctgaaaaaggatgccaaacatctccgtccagtccagcca

SEQ ID NO: 2149 - RNA, 89 nt, synthetic construct
  source 1..89: mol_type = other RNA
acagcttatttggaagctgaaatgtgaggtttataacactcacaagaatcctgaaaaaggatgccaaacgactgatctccgtccagtcc

SEQ ID NO: 2150 - RNA, 89 nt, synthetic construct
  source 1..89: mol_type = other RNA
acagcttatttggaagctgaaatgtgaggtttataacactcacaagaatcctgaaaaaggatgccaaacggaaatccctaggagactga

SEQ ID NO: 2151 - RNA, 89 nt, synthetic construct
  source 1..89: mol_type = other RNA
acagcttatttggaagctgaaatgtgaggtttataacactcacaagaatcctgaaaaaggatgccaaacgctgactggctccccaggga

SEQ ID NO: 2152 - RNA, 89 nt, synthetic construct
  source 1..89: mol_type = other RNA
acagcttatttggaagctgaaatgtgaggtttataacactcacaagaatcctgaaaaaggatgccaaacacacccctcccgggcctcca

SEQ ID NO: 2153 - RNA, 89 nt, synthetic construct
  source 1..89: mol_type = other RNA
acagcttatttggaagctgaaatgtgaggtttataacactcacaagaatcctgaaaaaggatgccaaacgctctagcaagtgcttctcc

SEQ ID NO: 2154 - RNA, 89 nt, synthetic construct
  source 1..89: mol_type = other RNA
acagcttatttggaagctgaaatgtgaggtttataacactcacaagaatcctgaaaaaggatgccaaaccttctccaggcttgctggct

SEQ ID NO: 2155 - RNA, 89 nt, synthetic construct
  source 1..89: mol_type = other RNA
acagcttatttggaagctgaaatgtgaggtttataacactcacaagaatcctgaaaaaggatgccaaacttttatatcatctccagggc

SEQ ID NO: 2156 - RNA, 89 nt, synthetic construct
  source 1..89: mol_type = other RNA
acagcttatttggaagctgaaatgtgaggtttataacactcacaagaatcctgaaaaaggatgccaaactccagatgcagcaagcgggc

SEQ ID NO: 2157 - RNA, 89 nt, synthetic construct
  source 1..89: mol_type = other RNA
acagcttatttggaagctgaaatgtgaggtttataacactcacaagaatcctgaaaaaggatgccaaacgctccccagggagaggctgg

SEQ ID NO: 2158 - RNA, 89 nt, synthetic construct
  source 1..89: mol_type = other RNA
acagcttatttggaagctgaaatgtgaggtttataacactcacaagaatcctgaaaaaggatgccaaacagtttagaaggctgccaggt

SEQ ID NO: 2159 - RNA, 89 nt, synthetic construct
  source 1..89: mol_type = other RNA
acagcttatttggaagctgaaatgtgaggtttataacactcacaagaatcctgaaaaaggatgccaaacctgctgctgctgctgctgct

SEQ ID NO: 2160 - RNA, 89 nt, synthetic construct
  source 1..89: mol_type = other RNA
acagcttatttggaagctgaaatgtgaggtttataacactcacaagaatcctgaaaaaggatgccaaaccgttccgaggaggacggcct

SEQ ID NO: 2161 - RNA, 89 nt, synthetic construct
  source 1..89: mol_type = other RNA
acagcttatttggaagctgaaatgtgaggtttataacactcacaagaatcctgaaaaaggatgccaaacaggtcagtgtgcagggtgca

SEQ ID NO: 2162 - RNA, 89 nt, synthetic construct
  source 1..89: mol_type = other RNA
acagcttatttggaagctgaaatgtgaggtttataacactcacaagaatcctgaaaaaggatgccaaacggcagcgaggagtccacagt

SEQ ID NO: 2163 - RNA, 89 nt, synthetic construct
  source 1..89: mol_type = other RNA
acagcttatttggaagctgaaatgtgaggtttataacactcacaagaatcctgaaaaaggatgccaaaccgaggagctggtgctagcct

SEQ ID NO: 2164 - RNA, 89 nt, synthetic construct
  source 1..89: mol_type = other RNA
acagcttatttggaagctgaaatgtgaggtttataacactcacaagaatcctgaaaaaggatgccaaacgaggagtgagccaggcagtg

SEQ ID NO: 2165 - RNA, 89 nt, synthetic construct
  source 1..89: mol_type = other RNA
acagcttatttggaagctgaaatgtgaggtttataacactcacaagaatcctgaaaaaggatgccaaacgtgctagccttgcgttccga

SEQ ID NO: 2166 - RNA, 89 nt, synthetic construct
  source 1..89: mol_type = other RNA
acagcttatttggaagctgaaatgtgaggtttataacactcacaagaatcctgaaaaaggatgccaaacaagggcagaggccggagggg

SEQ ID NO: 2167 - RNA, 89 nt, synthetic construct
  source 1..89: mol_type = other RNA
acagcttatttggaagctgaaatgtgaggtttataacactcacaagaatcctgaaaaaggatgccaaacgtaaggtcagtgtgcagggt

SEQ ID NO: 2168 - RNA, 89 nt, synthetic construct
  source 1..89: mol_type = other RNA
acagcttatttggaagctgaaatgtgaggtttataacactcacaagaatcctgaaaaaggatgccaaacgagtctggcatcccacgcag

SEQ ID NO: 2169 - RNA, 89 nt, synthetic construct
  source 1..89: mol_type = other RNA
acagcttatttggaagctgaaatgtgaggtttataacactcacaagaatcctgaaaaaggatgccaaacgttgcaggcgggcgccgccg

SEQ ID NO: 2170 - RNA, 89 nt, synthetic construct
  source 1..89: mol_type = other RNA
acagcttatttggaagctgaaatgtgaggtttataacactcacaagaatcctgaaaaaggatgccaaacaacttcagctcctgcacagt

SEQ ID NO: 2171 - RNA, 89 nt, synthetic construct
  source 1..89: mol_type = other RNA
acagcttatttggaagctgaaatgtgaggtttataacactcacaagaatcctgaaaaaggatgccaaacatctgcgcgccccaggcgtc

SEQ ID NO: 2172 - RNA, 89 nt, synthetic construct
  source 1..89: mol_type = other RNA
acagcttatttggaagctgaaatgtgaggtttataacactcacaagaatcctgaaaaaggatgccaaacgggcgccggcctgccttcca

SEQ ID NO: 2173 - RNA, 89 nt, synthetic construct
  source 1..89: mol_type = other RNA
acagcttatttggaagctgaaatgtgaggtttataacactcacaagaatcctgaaaaaggatgccaaacatgtttaatcagataggatc

SEQ ID NO: 2174 - RNA, 89 nt, synthetic construct
  source 1..89: mol_type = other RNA
acagcttatttggaagctgaaatgtgaggtttataacactcacaagaatcctgaaaaaggatgccaaacaggccagtggaaagaattcg

SEQ ID NO: 2175 - RNA, 89 nt, synthetic construct
  source 1..89: mol_type = other RNA
acagcttatttggaagctgaaatgtgaggtttataacactcacaagaatcctgaaaaaggatgccaaacagcctggaggagtgagccag

SEQ ID NO: 2176 - RNA, 89 nt, synthetic construct
  source 1..89: mol_type = other RNA
acagcttatttggaagctgaaatgtgaggtttataacactcacaagaatcctgaaaaaggatgccaaacgccctcatgggcaccgtcag

SEQ ID NO: 2177 - RNA, 89 nt, synthetic construct
  source 1..89: mol_type = other RNA
acagcttatttggaagctgaaatgtgaggtttataacactcacaagaatcctgaaaaaggatgccaaacatctgacgctgtttggggag

SEQ ID NO: 2178 - RNA, 89 nt, synthetic construct
  source 1..89: mol_type = other RNA
acagcttatttggaagctgaaatgtgaggtttataacactcacaagaatcctgaaaaaggatgccaaacggatttgggagttttttctt

SEQ ID NO: 2179 - RNA, 89 nt, synthetic construct
  source 1..89: mol_type = other RNA
acagcttatttggaagctgaaatgtgaggtttataacactcacaagaatcctgaaaaaggatgccaaacggatcgtccgatggggctct

SEQ ID NO: 2180 - RNA, 89 nt, synthetic construct
  source 1..89: mol_type = other RNA
acagcttatttggaagctgaaatgtgaggtttataacactcacaagaatcctgaaaaaggatgccaaacgccttgcgttccgaggagga

SEQ ID NO: 2181 - RNA, 89 nt, synthetic construct
  source 1..89: mol_type = other RNA
acagcttatttggaagctgaaatgtgaggtttataacactcacaagaatcctgaaaaaggatgccaaacgttggtaaggtcagtgtgca

SEQ ID NO: 2182 - RNA, 89 nt, synthetic construct
  source 1..89: mol_type = other RNA
acagcttatttggaagctgaaatgtgaggtttataacactcacaagaatcctgaaaaaggatgccaaacccttccagcccagttaggat

SEQ ID NO: 2183 - RNA, 89 nt, synthetic construct
  source 1..89: mol_type = other RNA
acagcttatttggaagctgaaatgtgaggtttataacactcacaagaatcctgaaaaaggatgccaaacgccgaagcacccgagcacgg

SEQ ID NO: 2184 - RNA, 89 nt, synthetic construct
  source 1..89: mol_type = other RNA
acagcttatttggaagctgaaatgtgaggtttataacactcacaagaatcctgaaaaaggatgccaaacgcgtgatctgcgcgccccag

SEQ ID NO: 2185 - RNA, 89 nt, synthetic construct
  source 1..89: mol_type = other RNA
acagcttatttggaagctgaaatgtgaggtttataacactcacaagaatcctgaaaaaggatgccaaacgtggcgtgatctgcgcgccc

SEQ ID NO: 2186 - RNA, 89 nt, synthetic construct
  source 1..89: mol_type = other RNA
acagcttatttggaagctgaaatgtgaggtttataacactcacaagaatcctgaaaaaggatgccaaacccactgctgctgctgctgct

SEQ ID NO: 2187 - RNA, 89 nt, synthetic construct
  source 1..89: mol_type = other RNA
acagcttatttggaagctgaaatgtgaggtttataacactcacaagaatcctgaaaaaggatgccaaacctgctgctgctgctgctcct

SEQ ID NO: 2188 - RNA, 89 nt, synthetic construct
  source 1..89: mol_type = other RNA
acagcttatttggaagctgaaatgtgaggtttataacactcacaagaatcctgaaaaaggatgccaaacaaaaggtgggcccggcagaa

SEQ ID NO: 2189 - RNA, 89 nt, synthetic construct
  source 1..89: mol_type = other RNA
acagcttatttggaagctgaaatgtgaggtttataacactcacaagaatcctgaaaaaggatgccaaacctcctgggtcccgcgggcgc

SEQ ID NO: 2190 - RNA, 89 nt, synthetic construct
  source 1..89: mol_type = other RNA
acagcttatttggaagctgaaatgtgaggtttataacactcacaagaatcctgaaaaaggatgccaaactttggggagggcgaggccga

SEQ ID NO: 2191 - RNA, 89 nt, synthetic construct
  source 1..89: mol_type = other RNA
acagcttatttggaagctgaaatgtgaggtttataacactcacaagaatcctgaaaaaggatgccaaacgaaggctgccaggttaaggc

SEQ ID NO: 2192 - RNA, 89 nt, synthetic construct
  source 1..89: mol_type = other RNA
acagcttatttggaagctgaaatgtgaggtttataacactcacaagaatcctgaaaaaggatgccaaacgggagggcgaggccgaaacc

SEQ ID NO: 2193 - RNA, 89 nt, synthetic construct
  source 1..89: mol_type = other RNA
acagcttatttggaagctgaaatgtgaggtttataacactcacaagaatcctgaaaaaggatgccaaacctgctcctgggtcccgcggg

SEQ ID NO: 2194 - RNA, 89 nt, synthetic construct
  source 1..89: mol_type = other RNA
acagcttatttggaagctgaaatgtgaggtttataacactcacaagaatcctgaaaaaggatgccaaacagccaggcagtgagactggc

SEQ ID NO: 2195 - RNA, 89 nt, synthetic construct
  source 1..89: mol_type = other RNA
acagcttatttggaagctgaaatgtgaggtttataacactcacaagaatcctgaaaaaggatgccaaacatcagataggatcgtccgat

SEQ ID NO: 2196 - RNA, 89 nt, synthetic construct
  source 1..89: mol_type = other RNA
acagcttatttggaagctgaaatgtgaggtttataacactcacaagaatcctgaaaaaggatgccaaacgggctctggtggcgtgatct

SEQ ID NO: 2197 - RNA, 89 nt, synthetic construct
  source 1..89: mol_type = other RNA
acagcttatttggaagctgaaatgtgaggtttataacactcacaagaatcctgaaaaaggatgccaaacctgctgctgctcctgggtcc

SEQ ID NO: 2198 - RNA, 89 nt, synthetic construct
  source 1..89: mol_type = other RNA
acagcttatttggaagctgaaatgtgaggtttataacactcacaagaatcctgaaaaaggatgccaaactgcagggtgcataaagggca

SEQ ID NO: 2199 - RNA, 89 nt, synthetic construct
  source 1..89: mol_type = other RNA
acagcttatttggaagctgaaatgtgaggtttataacactcacaagaatcctgaaaaaggatgccaaacattcagaagtctcactggtc

SEQ ID NO: 2200 - RNA, 89 nt, synthetic construct
  source 1..89: mol_type = other RNA
acagcttatttggaagctgaaatgtgaggtttataacactcacaagaatcctgaaaaaggatgccaaacgaaagaattcggtgggcagc

SEQ ID NO: 2201 - RNA, 89 nt, synthetic construct
  source 1..89: mol_type = other RNA
acagcttatttggaagctgaaatgtgaggtttataacactcacaagaatcctgaaaaaggatgccaaaccataaagggcagaggccgga

SEQ ID NO: 2202 - RNA, 89 nt, synthetic construct
  source 1..89: mol_type = other RNA
acagcttatttggaagctgaaatgtgaggtttataacactcacaagaatcctgaaaaaggatgccaaacggattgattcagaagtctca

SEQ ID NO: 2203 - RNA, 89 nt, synthetic construct
  source 1..89: mol_type = other RNA
acagcttatttggaagctgaaatgtgaggtttataacactcacaagaatcctgaaaaaggatgccaaacgcatcccacgcagggtgaga

SEQ ID NO: 2204 - RNA, 89 nt, synthetic construct
  source 1..89: mol_type = other RNA
acagcttatttggaagctgaaatgtgaggtttataacactcacaagaatcctgaaaaaggatgccaaaccagggtgcataaagggcaga

SEQ ID NO: 2205 - RNA, 89 nt, synthetic construct
  source 1..89: mol_type = other RNA
acagcttatttggaagctgaaatgtgaggtttataacactcacaagaatcctgaaaaaggatgccaaacgtcagcaggagacaaggtgg

SEQ ID NO: 2206 - RNA, 89 nt, synthetic construct
  source 1..89: mol_type = other RNA
acagcttatttggaagctgaaatgtgaggtttataacactcacaagaatcctgaaaaaggatgccaaacgacccaggaaacactgaaaa

SEQ ID NO: 2207 - RNA, 89 nt, synthetic construct
  source 1..89: mol_type = other RNA
acagcttatttggaagctgaaatgtgaggtttataacactcacaagaatcctgaaaaaggatgccaaacagaggcgggagaggaggagc

SEQ ID NO: 2208 - RNA, 89 nt, synthetic construct
  source 1..89: mol_type = other RNA
acagcttatttggaagctgaaatgtgaggtttataacactcacaagaatcctgaaaaaggatgccaaacggtcccgcgggcgcccgtgc

SEQ ID NO: 2209 - RNA, 89 nt, synthetic construct
  source 1..89: mol_type = other RNA
acagcttatttggaagctgaaatgtgaggtttataacactcacaagaatcctgaaaaaggatgccaaactttaatcagataggatcgtc

SEQ ID NO: 2210 - RNA, 89 nt, synthetic construct
  source 1..89: mol_type = other RNA
acagcttatttggaagctgaaatgtgaggtttataacactcacaagaatcctgaaaaaggatgccaaacctagccttgcgttccgagga

SEQ ID NO: 2211 - RNA, 89 nt, synthetic construct
  source 1..89: mol_type = other RNA
acagcttatttggaagctgaaatgtgaggtttataacactcacaagaatcctgaaaaaggatgccaaaccgcgccccaggcgtcaagca

SEQ ID NO: 2212 - RNA, 89 nt, synthetic construct
  source 1..89: mol_type = other RNA
acagcttatttggaagctgaaatgtgaggtttataacactcacaagaatcctgaaaaaggatgccaaacgctcgggcgggccgggacgc

SEQ ID NO: 2213 - RNA, 89 nt, synthetic construct
  source 1..89: mol_type = other RNA
acagcttatttggaagctgaaatgtgaggtttataacactcacaagaatcctgaaaaaggatgccaaaccgcgtaatctgacgctgttt

SEQ ID NO: 2214 - RNA, 89 nt, synthetic construct
  source 1..89: mol_type = other RNA
acagcttatttggaagctgaaatgtgaggtttataacactcacaagaatcctgaaaaaggatgccaaacggcccggcagaacttggagt

SEQ ID NO: 2215 - RNA, 89 nt, synthetic construct
  source 1..89: mol_type = other RNA
acagcttatttggaagctgaaatgtgaggtttataacactcacaagaatcctgaaaaaggatgccaaacctgctgctgctgctcctggg

SEQ ID NO: 2216 - RNA, 89 nt, synthetic construct
  source 1..89: mol_type = other RNA
acagcttatttggaagctgaaatgtgaggtttataacactcacaagaatcctgaaaaaggatgccaaacgccgctgccactgctgctgc

SEQ ID NO: 2217 - RNA, 89 nt, synthetic construct
  source 1..89: mol_type = other RNA
acagcttatttggaagctgaaatgtgaggtttataacactcacaagaatcctgaaaaaggatgccaaacccaggttaaggccagtggaa

SEQ ID NO: 2218 - RNA, 89 nt, synthetic construct
  source 1..89: mol_type = other RNA
acagcttatttggaagctgaaatgtgaggtttataacactcacaagaatcctgaaaaaggatgccaaacagactggctcgggcgggccg

SEQ ID NO: 2219 - RNA, 89 nt, synthetic construct
  source 1..89: mol_type = other RNA
acagcttatttggaagctgaaatgtgaggtttataacactcacaagaatcctgaaaaaggatgccaaacggagttttttcttccctctg

SEQ ID NO: 2220 - RNA, 89 nt, synthetic construct
  source 1..89: mol_type = other RNA
acagcttatttggaagctgaaatgtgaggtttataacactcacaagaatcctgaaaaaggatgccaaacacgctgtttggggagggcga

SEQ ID NO: 2221 - RNA, 89 nt, synthetic construct
  source 1..89: mol_type = other RNA
acagcttatttggaagctgaaatgtgaggtttataacactcacaagaatcctgaaaaaggatgccaaacctgctgctcctgggtcccgc

SEQ ID NO: 2222 - RNA, 89 nt, synthetic construct
  source 1..89: mol_type = other RNA
acagcttatttggaagctgaaatgtgaggtttataacactcacaagaatcctgaaaaaggatgccaaaccgcaggaggacgaggacggc

SEQ ID NO: 2223 - RNA, 89 nt, synthetic construct
  source 1..89: mol_type = other RNA
acagcttatttggaagctgaaatgtgaggtttataacactcacaagaatcctgaaaaaggatgccaaaccaggcgggcgccgccgttca

SEQ ID NO: 2224 - RNA, 89 nt, synthetic construct
  source 1..89: mol_type = other RNA
acagcttatttggaagctgaaatgtgaggtttataacactcacaagaatcctgaaaaaggatgccaaacggtctcctcgccaggacagc

SEQ ID NO: 2225 - RNA, 89 nt, synthetic construct
  source 1..89: mol_type = other RNA
acagcttatttggaagctgaaatgtgaggtttataacactcacaagaatcctgaaaaaggatgccaaaccagcagcggctcccagctcc

SEQ ID NO: 2226 - RNA, 89 nt, synthetic construct
  source 1..89: mol_type = other RNA
acagcttatttggaagctgaaatgtgaggtttataacactcacaagaatcctgaaaaaggatgccaaacatcctccagtccgggggttc

SEQ ID NO: 2227 - RNA, 89 nt, synthetic construct
  source 1..89: mol_type = other RNA
acagcttatttggaagctgaaatgtgaggtttataacactcacaagaatcctgaaaaaggatgccaaacgaccgcgcacggcctctagg

SEQ ID NO: 2228 - RNA, 89 nt, synthetic construct
  source 1..89: mol_type = other RNA
acagcttatttggaagctgaaatgtgaggtttataacactcacaagaatcctgaaaaaggatgccaaacgaaggtttccgcagcgacgt

SEQ ID NO: 2229 - RNA, 89 nt, synthetic construct
  source 1..89: mol_type = other RNA
acagcttatttggaagctgaaatgtgaggtttataacactcacaagaatcctgaaaaaggatgccaaaccacagtcctccccaccgcaa

SEQ ID NO: 2230 - RNA, 89 nt, synthetic construct
  source 1..89: mol_type = other RNA
acagcttatttggaagctgaaatgtgaggtttataacactcacaagaatcctgaaaaaggatgccaaacgtggccgctgccactgctgc

SEQ ID NO: 2231 - RNA, 89 nt, synthetic construct
  source 1..89: mol_type = other RNA
acagcttatttggaagctgaaatgtgaggtttataacactcacaagaatcctgaaaaaggatgccaaacctcctgaacttcagctcctg

SEQ ID NO: 2232 - RNA, 89 nt, synthetic construct
  source 1..89: mol_type = other RNA
acagcttatttggaagctgaaatgtgaggtttataacactcacaagaatcctgaaaaaggatgccaaacggcaccgtcagctccaggcg

SEQ ID NO: 2233 - RNA, 89 nt, synthetic construct
  source 1..89: mol_type = other RNA
acagcttatttggaagctgaaatgtgaggtttataacactcacaagaatcctgaaaaaggatgccaaacacgcctggggcgcgcagatc

SEQ ID NO: 2234 - RNA, 89 nt, synthetic construct
  source 1..89: mol_type = other RNA
acagcttatttggaagctgaaatgtgaggtttataacactcacaagaatcctgaaaaaggatgccaaacctgtggactcctcgctgccc

SEQ ID NO: 2235 - RNA, 89 nt, synthetic construct
  source 1..89: mol_type = other RNA
acagcttatttggaagctgaaatgtgaggtttataacactcacaagaatcctgaaaaaggatgccaaacctcgggtgcttcggccaggc

SEQ ID NO: 2236 - RNA, 89 nt, synthetic construct
  source 1..89: mol_type = other RNA
acagcttatttggaagctgaaatgtgaggtttataacactcacaagaatcctgaaaaaggatgccaaacattaaacattaacggaaccc

SEQ ID NO: 2237 - RNA, 89 nt, synthetic construct
  source 1..89: mol_type = other RNA
acagcttatttggaagctgaaatgtgaggtttataacactcacaagaatcctgaaaaaggatgccaaacaatcaatcctactgtggact

SEQ ID NO: 2238 - RNA, 89 nt, synthetic construct
  source 1..89: mol_type = other RNA
acagcttatttggaagctgaaatgtgaggtttataacactcacaagaatcctgaaaaaggatgccaaactctgattaaacattaacgga

SEQ ID NO: 2239 - RNA, 89 nt, synthetic construct
  source 1..89: mol_type = other RNA
acagcttatttggaagctgaaatgtgaggtttataacactcacaagaatcctgaaaaaggatgccaaaccccaccgaattctttccact

SEQ ID NO: 2240 - RNA, 89 nt, synthetic construct
  source 1..89: mol_type = other RNA
acagcttatttggaagctgaaatgtgaggtttataacactcacaagaatcctgaaaaaggatgccaaacgctgggagctgggagccgct

SEQ ID NO: 2241 - RNA, 89 nt, synthetic construct
  source 1..89: mol_type = other RNA
acagcttatttggaagctgaaatgtgaggtttataacactcacaagaatcctgaaaaaggatgccaaactctcctgctgaccagtgaga

SEQ ID NO: 2242 - RNA, 89 nt, synthetic construct
  source 1..89: mol_type = other RNA
acagcttatttggaagctgaaatgtgaggtttataacactcacaagaatcctgaaaaaggatgccaaaccgcgcagagggaagaaaaaa

SEQ ID NO: 2243 - RNA, 89 nt, synthetic construct
  source 1..89: mol_type = other RNA
acagcttatttggaagctgaaatgtgaggtttataacactcacaagaatcctgaaaaaggatgccaaactgggtgcttgacgcctgggg

SEQ ID NO: 2244 - RNA, 89 nt, synthetic construct
  source 1..89: mol_type = other RNA
acagcttatttggaagctgaaatgtgaggtttataacactcacaagaatcctgaaaaaggatgccaaacctgtcctggcgaggagacct

SEQ ID NO: 2245 - RNA, 89 nt, synthetic construct
  source 1..89: mol_type = other RNA
acagcttatttggaagctgaaatgtgaggtttataacactcacaagaatcctgaaaaaggatgccaaacaactgaacggcggcgcccgc

SEQ ID NO: 2246 - RNA, 89 nt, synthetic construct
  source 1..89: mol_type = other RNA
acagcttatttggaagctgaaatgtgaggtttataacactcacaagaatcctgaaaaaggatgccaaacccgggcccaccttttcagtg

SEQ ID NO: 2247 - RNA, 89 nt, synthetic construct
  source 1..89: mol_type = other RNA
acagcttatttggaagctgaaatgtgaggtttataacactcacaagaatcctgaaaaaggatgccaaacgcgcagcggtggaaggtggc

SEQ ID NO: 2248 - RNA, 89 nt, synthetic construct
  source 1..89: mol_type = other RNA
acagcttatttggaagctgaaatgtgaggtttataacactcacaagaatcctgaaaaaggatgccaaaccttcggccaggccgtcctcc

SEQ ID NO: 2249 - RNA, 89 nt, synthetic construct
  source 1..89: mol_type = other RNA
acagcttatttggaagctgaaatgtgaggtttataacactcacaagaatcctgaaaaaggatgccaaaccgtgggatgccagactccaa

SEQ ID NO: 2250 - RNA, 89 nt, synthetic construct
  source 1..89: mol_type = other RNA
acagcttatttggaagctgaaatgtgaggtttataacactcacaagaatcctgaaaaaggatgccaaaccccatgagggccaggggaga

SEQ ID NO: 2251 - RNA, 89 nt, synthetic construct
  source 1..89: mol_type = other RNA
acagcttatttggaagctgaaatgtgaggtttataacactcacaagaatcctgaaaaaggatgccaaacagcgcctcgacgtcgctgcg

SEQ ID NO: 2252 - RNA, 89 nt, synthetic construct
  source 1..89: mol_type = other RNA
acagcttatttggaagctgaaatgtgaggtttataacactcacaagaatcctgaaaaaggatgccaaacccctttatgcaccctgcaca

SEQ ID NO: 2253 - RNA, 89 nt, synthetic construct
  source 1..89: mol_type = other RNA
acagcttatttggaagctgaaatgtgaggtttataacactcacaagaatcctgaaaaaggatgccaaacactgggctggaaggcaggcc

SEQ ID NO: 2254 - RNA, 89 nt, synthetic construct
  source 1..89: mol_type = other RNA
acagcttatttggaagctgaaatgtgaggtttataacactcacaagaatcctgaaaaaggatgccaaacggagccgctgctgcaacgac

SEQ ID NO: 2255 - RNA, 89 nt, synthetic construct
  source 1..89: mol_type = other RNA
acagcttatttggaagctgaaatgtgaggtttataacactcacaagaatcctgaaaaaggatgccaaacggtccaccttgtctcctgct

SEQ ID NO: 2256 - RNA, 89 nt, synthetic construct
  source 1..89: mol_type = other RNA
acagcttatttggaagctgaaatgtgaggtttataacactcacaagaatcctgaaaaaggatgccaaacggtgcttgacgcctggggcg

SEQ ID NO: 2257 - RNA, 89 nt, synthetic construct
  source 1..89: mol_type = other RNA
acagcttatttggaagctgaaatgtgaggtttataacactcacaagaatcctgaaaaaggatgccaaaccctggctcactcctccaggc

SEQ ID NO: 2258 - RNA, 89 nt, synthetic construct
  source 1..89: mol_type = other RNA
acagcttatttggaagctgaaatgtgaggtttataacactcacaagaatcctgaaaaaggatgccaaacgcgaggagacctagaggccg

SEQ ID NO: 2259 - RNA, 89 nt, synthetic construct
  source 1..89: mol_type = other RNA
acagcttatttggaagctgaaatgtgaggtttataacactcacaagaatcctgaaaaaggatgccaaacgctgtggttccgtgctcggg

SEQ ID NO: 2260 - RNA, 89 nt, synthetic construct
  source 1..89: mol_type = other RNA
acagcttatttggaagctgaaatgtgaggtttataacactcacaagaatcctgaaaaaggatgccaaaccggtggggaggactgtgcag

SEQ ID NO: 2261 - RNA, 89 nt, synthetic construct
  source 1..89: mol_type = other RNA
acagcttatttggaagctgaaatgtgaggtttataacactcacaagaatcctgaaaaaggatgccaaaccacactgaccttaccaacta

SEQ ID NO: 2262 - RNA, 89 nt, synthetic construct
  source 1..89: mol_type = other RNA
acagcttatttggaagctgaaatgtgaggtttataacactcacaagaatcctgaaaaaggatgccaaactggactcctcgctgcccacc

SEQ ID NO: 2263 - RNA, 89 nt, synthetic construct
  source 1..89: mol_type = other RNA
acagcttatttggaagctgaaatgtgaggtttataacactcacaagaatcctgaaaaaggatgccaaacgctgctccttgaagagattg

SEQ ID NO: 2264 - RNA, 89 nt, synthetic construct
  source 1..89: mol_type = other RNA
acagcttatttggaagctgaaatgtgaggtttataacactcacaagaatcctgaaaaaggatgccaaaccggaaaccttctagggtgtg

SEQ ID NO: 2265 - RNA, 89 nt, synthetic construct
  source 1..89: mol_type = other RNA
acagcttatttggaagctgaaatgtgaggtttataacactcacaagaatcctgaaaaaggatgccaaacaagttcaggagcagggcgcg

SEQ ID NO: 2266 - RNA, 89 nt, synthetic construct
  source 1..89: mol_type = other RNA
acagcttatttggaagctgaaatgtgaggtttataacactcacaagaatcctgaaaaaggatgccaaacctccttgaagagattgcttg

SEQ ID NO: 2267 - RNA, 89 nt, synthetic construct
  source 1..89: mol_type = other RNA
acagcttatttggaagctgaaatgtgaggtttataacactcacaagaatcctgaaaaaggatgccaaacgaggccgtgcgcggtccacg

SEQ ID NO: 2268 - RNA, 89 nt, synthetic construct
  source 1..89: mol_type = other RNA
acagcttatttggaagctgaaatgtgaggtttataacactcacaagaatcctgaaaaaggatgccaaacggctggaaggcaggccggcg

SEQ ID NO: 2269 - RNA, 89 nt, synthetic construct
  source 1..89: mol_type = other RNA
acagcttatttggaagctgaaatgtgaggtttataacactcacaagaatcctgaaaaaggatgccaaacctgaccagtgagacttctga

SEQ ID NO: 2270 - RNA, 89 nt, synthetic construct
  source 1..89: mol_type = other RNA
acagcttatttggaagctgaaatgtgaggtttataacactcacaagaatcctgaaaaaggatgccaaacgcctggaccccctccggcct

SEQ ID NO: 2271 - RNA, 89 nt, synthetic construct
  source 1..89: mol_type = other RNA
acagcttatttggaagctgaaatgtgaggtttataacactcacaagaatcctgaaaaaggatgccaaacggagctgggagccgctgctg

SEQ ID NO: 2272 - RNA, 89 nt, synthetic construct
  source 1..89: mol_type = other RNA
acagcttatttggaagctgaaatgtgaggtttataacactcacaagaatcctgaaaaaggatgccaaacggggctcctcctctcccgcc

SEQ ID NO: 2273 - RNA, 89 nt, synthetic construct
  source 1..89: mol_type = other RNA
acagcttatttggaagctgaaatgtgaggtttataacactcacaagaatcctgaaaaaggatgccaaacgcagcggccaccaggaccgc

SEQ ID NO: 2274 - RNA, 89 nt, synthetic construct
  source 1..89: mol_type = other RNA
acagcttatttggaagctgaaatgtgaggtttataacactcacaagaatcctgaaaaaggatgccaaacgcaccagctcctcgtagtcg

SEQ ID NO: 2275 - RNA, 89 nt, synthetic construct
  source 1..89: mol_type = other RNA
acagcttatttggaagctgaaatgtgaggtttataacactcacaagaatcctgaaaaaggatgccaaacgggtgtgggtgcttgacgcc

SEQ ID NO: 2276 - RNA, 89 nt, synthetic construct
  source 1..89: mol_type = other RNA
acagcttatttggaagctgaaatgtgaggtttataacactcacaagaatcctgaaaaaggatgccaaacagggccaggggagaggttgc

SEQ ID NO: 2277 - RNA, 89 nt, synthetic construct
  source 1..89: mol_type = other RNA
acagcttatttggaagctgaaatgtgaggtttataacactcacaagaatcctgaaaaaggatgccaaacacctggcagccttctaaact

SEQ ID NO: 2278 - RNA, 89 nt, synthetic construct
  source 1..89: mol_type = other RNA
acagcttatttggaagctgaaatgtgaggtttataacactcacaagaatcctgaaaaaggatgccaaactcctggcgaggagacctaga

SEQ ID NO: 2279 - RNA, 89 nt, synthetic construct
  source 1..89: mol_type = other RNA
acagcttatttggaagctgaaatgtgaggtttataacactcacaagaatcctgaaaaaggatgccaaacgggcgcgcagatcacgccac

SEQ ID NO: 2280 - RNA, 89 nt, synthetic construct
  source 1..89: mol_type = other RNA
acagcttatttggaagctgaaatgtgaggtttataacactcacaagaatcctgaaaaaggatgccaaacaacattaacggaacccccgg

SEQ ID NO: 2281 - RNA, 89 nt, synthetic construct
  source 1..89: mol_type = other RNA
acagcttatttggaagctgaaatgtgaggtttataacactcacaagaatcctgaaaaaggatgccaaacacggaacccccggactggag

SEQ ID NO: 2282 - RNA, 89 nt, synthetic construct
  source 1..89: mol_type = other RNA
acagcttatttggaagctgaaatgtgaggtttataacactcacaagaatcctgaaaaaggatgccaaacaccttaccaactagctgctc

SEQ ID NO: 2283 - RNA, 89 nt, synthetic construct
  source 1..89: mol_type = other RNA
acagcttatttggaagctgaaatgtgaggtttataacactcacaagaatcctgaaaaaggatgccaaaccgcacgggcgcccgcgggac

SEQ ID NO: 2284 - RNA, 89 nt, synthetic construct
  source 1..89: mol_type = other RNA
acagcttatttggaagctgaaatgtgaggtttataacactcacaagaatcctgaaaaaggatgccaaacctgcaacgacgcgtcccggc

SEQ ID NO: 2285 - RNA, 89 nt, synthetic construct
  source 1..89: mol_type = other RNA
acagcttatttggaagctgaaatgtgaggtttataacactcacaagaatcctgaaaaaggatgccaaacagccttgcggtggggaggac

SEQ ID NO: 2286 - RNA, 89 nt, synthetic construct
  source 1..89: mol_type = other RNA
acagcttatttggaagctgaaatgtgaggtttataacactcacaagaatcctgaaaaaggatgccaaacgctcactcctccaggctcag

SEQ ID NO: 2287 - RNA, 89 nt, synthetic construct
  source 1..89: mol_type = other RNA
acagcttatttggaagctgaaatgtgaggtttataacactcacaagaatcctgaaaaaggatgccaaacaacggcggcgcccgcctgca

SEQ ID NO: 2288 - RNA, 89 nt, synthetic construct
  source 1..89: mol_type = other RNA
acagcttatttggaagctgaaatgtgaggtttataacactcacaagaatcctgaaaaaggatgccaaaccaggagctgaagttcaggag

SEQ ID NO: 2289 - RNA, 89 nt, synthetic construct
  source 1..89: mol_type = other RNA
acagcttatttggaagctgaaatgtgaggtttataacactcacaagaatcctgaaaaaggatgccaaacgttccgtgctcgggtgcttc

SEQ ID NO: 2290 - RNA, 89 nt, synthetic construct
  source 1..89: mol_type = other RNA
acagcttatttggaagctgaaatgtgaggtttataacactcacaagaatcctgaaaaaggatgccaaacacggtgcccatgagggccag

SEQ ID NO: 2291 - RNA, 89 nt, synthetic construct
  source 1..89: mol_type = other RNA
acagcttatttggaagctgaaatgtgaggtttataacactcacaagaatcctgaaaaaggatgccaaactttcctgggtccaccttgtc

SEQ ID NO: 2292 - RNA, 89 nt, synthetic construct
  source 1..89: mol_type = other RNA
acagcttatttggaagctgaaatgtgaggtttataacactcacaagaatcctgaaaaaggatgccaaacgtcgccgtcctcgtcctcct

SEQ ID NO: 2293 - RNA, 89 nt, synthetic construct
  source 1..89: mol_type = other RNA
acagcttatttggaagctgaaatgtgaggtttataacactcacaagaatcctgaaaaaggatgccaaacgcagccttctaaacttagcc

SEQ ID NO: 2294 - RNA, 89 nt, synthetic construct
  source 1..89: mol_type = other RNA
acagcttatttggaagctgaaatgtgaggtttataacactcacaagaatcctgaaaaaggatgccaaaccaaccatgagcgcctcgacg

SEQ ID NO: 2295 - RNA, 89 nt, synthetic construct
  source 1..89: mol_type = other RNA
acagcttatttggaagctgaaatgtgaggtttataacactcacaagaatcctgaaaaaggatgccaaaccaacgacgcgtcccggcccg

SEQ ID NO: 2296 - RNA, 89 nt, synthetic construct
  source 1..89: mol_type = other RNA
acagcttatttggaagctgaaatgtgaggtttataacactcacaagaatcctgaaaaaggatgccaaactggttccgtgctcgggtgct

SEQ ID NO: 2297 - RNA, 89 nt, synthetic construct
  source 1..89: mol_type = other RNA
acagcttatttggaagctgaaatgtgaggtttataacactcacaagaatcctgaaaaaggatgccaaactgcaccctgcacactgacct

SEQ ID NO: 2298 - RNA, 89 nt, synthetic construct
  source 1..89: mol_type = other RNA
acagcttatttggaagctgaaatgtgaggtttataacactcacaagaatcctgaaaaaggatgccaaactgcaggagctgaagttcagg

SEQ ID NO: 2299 - RNA, 89 nt, synthetic construct
  source 1..89: mol_type = other RNA
acagcttatttggaagctgaaatgtgaggtttataacactcacaagaatcctgaaaaaggatgccaaacaaggggcgcgcggaatcctg

SEQ ID NO: 2300 - RNA, 89 nt, synthetic construct
  source 1..89: mol_type = other RNA
acagcttatttggaagctgaaatgtgaggtttataacactcacaagaatcctgaaaaaggatgccaaacgaggatcaggtttcggcctc

SEQ ID NO: 2301 - RNA, 89 nt, synthetic construct
  source 1..89: mol_type = other RNA
acagcttatttggaagctgaaatgtgaggtttataacactcacaagaatcctgaaaaaggatgccaaacggatgccagactccaagttc

SEQ ID NO: 2302 - RNA, 89 nt, synthetic construct
  source 1..89: mol_type = other RNA
acagcttatttggaagctgaaatgtgaggtttataacactcacaagaatcctgaaaaaggatgccaaacgactcctcgctgcccaccga

SEQ ID NO: 2303 - RNA, 89 nt, synthetic construct
  source 1..89: mol_type = other RNA
acagcttatttggaagctgaaatgtgaggtttataacactcacaagaatcctgaaaaaggatgccaaacgagctgacggtgcccatgag

SEQ ID NO: 2304 - RNA, 89 nt, synthetic construct
  source 1..89: mol_type = other RNA
acagcttatttggaagctgaaatgtgaggtttataacactcacaagaatcctgaaaaaggatgccaaacgccttaacctggcagccttc

SEQ ID NO: 2305 - RNA, 89 nt, synthetic construct
  source 1..89: mol_type = other RNA
acagcttatttggaagctgaaatgtgaggtttataacactcacaagaatcctgaaaaaggatgccaaaccaccctgcacactgacctta

SEQ ID NO: 2306 - RNA, 89 nt, synthetic construct
  source 1..89: mol_type = other RNA
acagcttatttggaagctgaaatgtgaggtttataacactcacaagaatcctgaaaaaggatgccaaacgggaggactgtgcaggagct

SEQ ID NO: 2307 - RNA, 89 nt, synthetic construct
  source 1..89: mol_type = other RNA
acagcttatttggaagctgaaatgtgaggtttataacactcacaagaatcctgaaaaaggatgccaaacccagactccaagttctgccg

SEQ ID NO: 2308 - RNA, 89 nt, synthetic construct
  source 1..89: mol_type = other RNA
acagcttatttggaagctgaaatgtgaggtttataacactcacaagaatcctgaaaaaggatgccaaacgaccccctccggcctctgcc

SEQ ID NO: 2309 - RNA, 89 nt, synthetic construct
  source 1..89: mol_type = other RNA
acagcttatttggaagctgaaatgtgaggtttataacactcacaagaatcctgaaaaaggatgccaaacaacttagcctggaccccctc

SEQ ID NO: 2310 - RNA, 89 nt, synthetic construct
  source 1..89: mol_type = other RNA
acagcttatttggaagctgaaatgtgaggtttataacactcacaagaatcctgaaaaaggatgccaaacgaaggcaggccggcgcccta

SEQ ID NO: 2311 - RNA, 89 nt, synthetic construct
  source 1..89: mol_type = other RNA
acagcttatttggaagctgaaatgtgaggtttataacactcacaagaatcctgaaaaaggatgccaaacccaactagctgctccttgaa

SEQ ID NO: 2312 - RNA, 89 nt, synthetic construct
  source 1..89: mol_type = other RNA
acagcttatttggaagctgaaatgtgaggtttataacactcacaagaatcctgaaaaaggatgccaaaccttgacgcctggggcgcgca

SEQ ID NO: 2313 - RNA, 89 nt, synthetic construct
  source 1..89: mol_type = other RNA
acagcttatttggaagctgaaatgtgaggtttataacactcacaagaatcctgaaaaaggatgccaaacaccagtgagacttctgaatc

SEQ ID NO: 2314 - RNA, 89 nt, synthetic construct
  source 1..89: mol_type = other RNA
acagcttatttggaagctgaaatgtgaggtttataacactcacaagaatcctgaaaaaggatgccaaacagacttctgaatcaatccta

SEQ ID NO: 2315 - RNA, 89 nt, synthetic construct
  source 1..89: mol_type = other RNA
acagcttatttggaagctgaaatgtgaggtttataacactcacaagaatcctgaaaaaggatgccaaaccgcggtccacgccggcggcg

SEQ ID NO: 2316 - RNA, 89 nt, synthetic construct
  source 1..89: mol_type = other RNA
acagcttatttggaagctgaaatgtgaggtttataacactcacaagaatcctgaaaaaggatgccaaacgaaggtggctgtggttccgt

SEQ ID NO: 2317 - RNA, 89 nt, synthetic construct
  source 1..89: mol_type = other RNA
acagcttatttggaagctgaaatgtgaggtttataacactcacaagaatcctgaaaaaggatgccaaactgttagacgatgtaaaaatt

SEQ ID NO: 2318 - RNA, 89 nt, synthetic construct
  source 1..89: mol_type = other RNA
acagcttatttggaagctgaaatgtgaggtttataacactcacaagaatcctgaaaaaggatgccaaactttccaaaagaactaaagta

SEQ ID NO: 2319 - RNA, 89 nt, synthetic construct
  source 1..89: mol_type = other RNA
acagcttatttggaagctgaaatgtgaggtttataacactcacaagaatcctgaaaaaggatgccaaacttaagttagttgctcatttc

SEQ ID NO: 2320 - RNA, 89 nt, synthetic construct
  source 1..89: mol_type = other RNA
acagcttatttggaagctgaaatgtgaggtttataacactcacaagaatcctgaaaaaggatgccaaacagaagaactacatataaact

SEQ ID NO: 2321 - RNA, 89 nt, synthetic construct
  source 1..89: mol_type = other RNA
acagcttatttggaagctgaaatgtgaggtttataacactcacaagaatcctgaaaaaggatgccaaacagagccgtaacaccacctga

SEQ ID NO: 2322 - RNA, 89 nt, synthetic construct
  source 1..89: mol_type = other RNA
acagcttatttggaagctgaaatgtgaggtttataacactcacaagaatcctgaaaaaggatgccaaacaaaacaggtagtcaccatag

SEQ ID NO: 2323 - RNA, 89 nt, synthetic construct
  source 1..89: mol_type = other RNA
acagcttatttggaagctgaaatgtgaggtttataacactcacaagaatcctgaaaaaggatgccaaacggcaaatattggtatatata

SEQ ID NO: 2324 - RNA, 89 nt, synthetic construct
  source 1..89: mol_type = other RNA
acagcttatttggaagctgaaatgtgaggtttataacactcacaagaatcctgaaaaaggatgccaaactatatagagttaagaagtct

SEQ ID NO: 2325 - RNA, 89 nt, synthetic construct
  source 1..89: mol_type = other RNA
acagcttatttggaagctgaaatgtgaggtttataacactcacaagaatcctgaaaaaggatgccaaaccttccagaagaaaacagttc

SEQ ID NO: 2326 - RNA, 89 nt, synthetic construct
  source 1..89: mol_type = other RNA
acagcttatttggaagctgaaatgtgaggtttataacactcacaagaatcctgaaaaaggatgccaaactttgatcagtctttttatga

SEQ ID NO: 2327 - RNA, 89 nt, synthetic construct
  source 1..89: mol_type = other RNA
acagcttatttggaagctgaaatgtgaggtttataacactcacaagaatcctgaaaaaggatgccaaaccccaacaaaaaagtttattt

SEQ ID NO: 2328 - RNA, 89 nt, synthetic construct
  source 1..89: mol_type = other RNA
acagcttatttggaagctgaaatgtgaggtttataacactcacaagaatcctgaaaaaggatgccaaacgcattgaatgtgtagtttat

SEQ ID NO: 2329 - RNA, 89 nt, synthetic construct
  source 1..89: mol_type = other RNA
acagcttatttggaagctgaaatgtgaggtttataacactcacaagaatcctgaaaaaggatgccaaactagtttataatacagcaaag

SEQ ID NO: 2330 - RNA, 89 nt, synthetic construct
  source 1..89: mol_type = other RNA
acagcttatttggaagctgaaatgtgaggtttataacactcacaagaatcctgaaaaaggatgccaaactccataagacgaagggccaa

SEQ ID NO: 2331 - RNA, 89 nt, synthetic construct
  source 1..89: mol_type = other RNA
acagcttatttggaagctgaaatgtgaggtttataacactcacaagaatcctgaaaaaggatgccaaacgcttttaaaaacaggtagtc

SEQ ID NO: 2332 - RNA, 89 nt, synthetic construct
  source 1..89: mol_type = other RNA
acagcttatttggaagctgaaatgtgaggtttataacactcacaagaatcctgaaaaaggatgccaaactgtcacttgaactcaactca

SEQ ID NO: 2333 - RNA, 89 nt, synthetic construct
  source 1..89: mol_type = other RNA
acagcttatttggaagctgaaatgtgaggtttataacactcacaagaatcctgaaaaaggatgccaaacaagaatatgtcacttgaact

SEQ ID NO: 2334 - RNA, 89 nt, synthetic construct
  source 1..89: mol_type = other RNA
acagcttatttggaagctgaaatgtgaggtttataacactcacaagaatcctgaaaaaggatgccaaactgatctatcgctgcaaacca

SEQ ID NO: 2335 - RNA, 89 nt, synthetic construct
  source 1..89: mol_type = other RNA
acagcttatttggaagctgaaatgtgaggtttataacactcacaagaatcctgaaaaaggatgccaaacagggagtggagaaaggcttc

SEQ ID NO: 2336 - RNA, 89 nt, synthetic construct
  source 1..89: mol_type = other RNA
acagcttatttggaagctgaaatgtgaggtttataacactcacaagaatcctgaaaaaggatgccaaaccagtttgagaaatgcatact

SEQ ID NO: 2337 - RNA, 89 nt, synthetic construct
  source 1..89: mol_type = other RNA
acagcttatttggaagctgaaatgtgaggtttataacactcacaagaatcctgaaaaaggatgccaaaccaagtcaaaaatgaagaggt

SEQ ID NO: 2338 - RNA, 89 nt, synthetic construct
  source 1..89: mol_type = other RNA
acagcttatttggaagctgaaatgtgaggtttataacactcacaagaatcctgaaaaaggatgccaaacatctatcgctgcaaaccagt

SEQ ID NO: 2339 - RNA, 89 nt, synthetic construct
  source 1..89: mol_type = other RNA
acagcttatttggaagctgaaatgtgaggtttataacactcacaagaatcctgaaaaaggatgccaaacaaatatttagaagagcaact

SEQ ID NO: 2340 - RNA, 89 nt, synthetic construct
  source 1..89: mol_type = other RNA
acagcttatttggaagctgaaatgtgaggtttataacactcacaagaatcctgaaaaaggatgccaaaccagagtaccagaggaacaca

SEQ ID NO: 2341 - RNA, 89 nt, synthetic construct
  source 1..89: mol_type = other RNA
acagcttatttggaagctgaaatgtgaggtttataacactcacaagaatcctgaaaaaggatgccaaaccttgaaattgaaaatcaaga

SEQ ID NO: 2342 - RNA, 89 nt, synthetic construct
  source 1..89: mol_type = other RNA
acagcttatttggaagctgaaatgtgaggtttataacactcacaagaatcctgaaaaaggatgccaaacccagaggaacacagcattga

SEQ ID NO: 2343 - RNA, 89 nt, synthetic construct
  source 1..89: mol_type = other RNA
acagcttatttggaagctgaaatgtgaggtttataacactcacaagaatcctgaaaaaggatgccaaacgagttaagaagtctaggtct

SEQ ID NO: 2344 - RNA, 89 nt, synthetic construct
  source 1..89: mol_type = other RNA
acagcttatttggaagctgaaatgtgaggtttataacactcacaagaatcctgaaaaaggatgccaaacgaagaaaaaattctacttca

SEQ ID NO: 2345 - RNA, 89 nt, synthetic construct
  source 1..89: mol_type = other RNA
acagcttatttggaagctgaaatgtgaggtttataacactcacaagaatcctgaaaaaggatgccaaacgatcactgtttccaaaagaa

SEQ ID NO: 2346 - RNA, 89 nt, synthetic construct
  source 1..89: mol_type = other RNA
acagcttatttggaagctgaaatgtgaggtttataacactcacaagaatcctgaaaaaggatgccaaactttcctccagaattgatcaa

SEQ ID NO: 2347 - RNA, 89 nt, synthetic construct
  source 1..89: mol_type = other RNA
acagcttatttggaagctgaaatgtgaggtttataacactcacaagaatcctgaaaaaggatgccaaacagctccttctttttattgtt

SEQ ID NO: 2348 - RNA, 89 nt, synthetic construct
  source 1..89: mol_type = other RNA
acagcttatttggaagctgaaatgtgaggtttataacactcacaagaatcctgaaaaaggatgccaaactaaactacaagtcaaaaatg

SEQ ID NO: 2349 - RNA, 89 nt, synthetic construct
  source 1..89: mol_type = other RNA
acagcttatttggaagctgaaatgtgaggtttataacactcacaagaatcctgaaaaaggatgccaaacaaaatgttcacaattaagct

SEQ ID NO: 2350 - RNA, 89 nt, synthetic construct
  source 1..89: mol_type = other RNA
acagcttatttggaagctgaaatgtgaggtttataacactcacaagaatcctgaaaaaggatgccaaacaagaggtaaagaatatgtca

SEQ ID NO: 2351 - RNA, 89 nt, synthetic construct
  source 1..89: mol_type = other RNA
acagcttatttggaagctgaaatgtgaggtttataacactcacaagaatcctgaaaaaggatgccaaactcacttgaactcaactcaaa

SEQ ID NO: 2352 - RNA, 89 nt, synthetic construct
  source 1..89: mol_type = other RNA
acagcttatttggaagctgaaatgtgaggtttataacactcacaagaatcctgaaaaaggatgccaaacgaagaaggttacattcgtgc

SEQ ID NO: 2353 - RNA, 89 nt, synthetic construct
  source 1..89: mol_type = other RNA
acagcttatttggaagctgaaatgtgaggtttataacactcacaagaatcctgaaaaaggatgccaaactcgctgcaaaccagtgaaat

SEQ ID NO: 2354 - RNA, 89 nt, synthetic construct
  source 1..89: mol_type = other RNA
acagcttatttggaagctgaaatgtgaggtttataacactcacaagaatcctgaaaaaggatgccaaacgtatatatagagttaagaag

SEQ ID NO: 2355 - RNA, 89 nt, synthetic construct
  source 1..89: mol_type = other RNA
acagcttatttggaagctgaaatgtgaggtttataacactcacaagaatcctgaaaaaggatgccaaacatcaagacaattcatcattt

SEQ ID NO: 2356 - RNA, 89 nt, synthetic construct
  source 1..89: mol_type = other RNA
acagcttatttggaagctgaaatgtgaggtttataacactcacaagaatcctgaaaaaggatgccaaacgcctccttcagttgggacat

SEQ ID NO: 2357 - RNA, 89 nt, synthetic construct
  source 1..89: mol_type = other RNA
acagcttatttggaagctgaaatgtgaggtttataacactcacaagaatcctgaaaaaggatgccaaactggaagaaggttacattcgt

SEQ ID NO: 2358 - RNA, 89 nt, synthetic construct
  source 1..89: mol_type = other RNA
acagcttatttggaagctgaaatgtgaggtttataacactcacaagaatcctgaaaaaggatgccaaacgccaatggcctccttcagtt

SEQ ID NO: 2359 - RNA, 89 nt, synthetic construct
  source 1..89: mol_type = other RNA
acagcttatttggaagctgaaatgtgaggtttataacactcacaagaatcctgaaaaaggatgccaaaccaaaccagtgaaatcaaaga

SEQ ID NO: 2360 - RNA, 89 nt, synthetic construct
  source 1..89: mol_type = other RNA
acagcttatttggaagctgaaatgtgaggtttataacactcacaagaatcctgaaaaaggatgccaaaccttttttcccctcaacttta

SEQ ID NO: 2361 - RNA, 89 nt, synthetic construct
  source 1..89: mol_type = other RNA
acagcttatttggaagctgaaatgtgaggtttataacactcacaagaatcctgaaaaaggatgccaaacactcaatgtggaagaaggtt

SEQ ID NO: 2362 - RNA, 89 nt, synthetic construct
  source 1..89: mol_type = other RNA
acagcttatttggaagctgaaatgtgaggtttataacactcacaagaatcctgaaaaaggatgccaaacatgattaactatgttcacct

SEQ ID NO: 2363 - RNA, 89 nt, synthetic construct
  source 1..89: mol_type = other RNA
acagcttatttggaagctgaaatgtgaggtttataacactcacaagaatcctgaaaaaggatgccaaacgaagagcaactaactaactt

SEQ ID NO: 2364 - RNA, 89 nt, synthetic construct
  source 1..89: mol_type = other RNA
acagcttatttggaagctgaaatgtgaggtttataacactcacaagaatcctgaaaaaggatgccaaacatctaactcaatgtggaaga

SEQ ID NO: 2365 - RNA, 89 nt, synthetic construct
  source 1..89: mol_type = other RNA
acagcttatttggaagctgaaatgtgaggtttataacactcacaagaatcctgaaaaaggatgccaaactagagttaagaagtctaggt

SEQ ID NO: 2366 - RNA, 89 nt, synthetic construct
  source 1..89: mol_type = other RNA
acagcttatttggaagctgaaatgtgaggtttataacactcacaagaatcctgaaaaaggatgccaaacatttcatttagcattgatct

SEQ ID NO: 2367 - RNA, 89 nt, synthetic construct
  source 1..89: mol_type = other RNA
acagcttatttggaagctgaaatgtgaggtttataacactcacaagaatcctgaaaaaggatgccaaacaaaattttagccaatggcct

SEQ ID NO: 2368 - RNA, 89 nt, synthetic construct
  source 1..89: mol_type = other RNA
acagcttatttggaagctgaaatgtgaggtttataacactcacaagaatcctgaaaaaggatgccaaacattaactatgttcacctacc

SEQ ID NO: 2369 - RNA, 89 nt, synthetic construct
  source 1..89: mol_type = other RNA
acagcttatttggaagctgaaatgtgaggtttataacactcacaagaatcctgaaaaaggatgccaaacttcacctaccaaccttacct

SEQ ID NO: 2370 - RNA, 89 nt, synthetic construct
  source 1..89: mol_type = other RNA
acagcttatttggaagctgaaatgtgaggtttataacactcacaagaatcctgaaaaaggatgccaaactgtagtttataatacagcaa

SEQ ID NO: 2371 - RNA, 89 nt, synthetic construct
  source 1..89: mol_type = other RNA
acagcttatttggaagctgaaatgtgaggtttataacactcacaagaatcctgaaaaaggatgccaaacctcatttctttgatttcatt

SEQ ID NO: 2372 - RNA, 89 nt, synthetic construct
  source 1..89: mol_type = other RNA
acagcttatttggaagctgaaatgtgaggtttataacactcacaagaatcctgaaaaaggatgccaaacccttttctgggcaaatattg

SEQ ID NO: 2373 - RNA, 89 nt, synthetic construct
  source 1..89: mol_type = other RNA
acagcttatttggaagctgaaatgtgaggtttataacactcacaagaatcctgaaaaaggatgccaaaccctattaagttagttgctca

SEQ ID NO: 2374 - RNA, 89 nt, synthetic construct
  source 1..89: mol_type = other RNA
acagcttatttggaagctgaaatgtgaggtttataacactcacaagaatcctgaaaaaggatgccaaactgttcacctaccaaccttac

SEQ ID NO: 2375 - RNA, 89 nt, synthetic construct
  source 1..89: mol_type = other RNA
acagcttatttggaagctgaaatgtgaggtttataacactcacaagaatcctgaaaaaggatgccaaacgagaaaggcttcagagagaa

SEQ ID NO: 2376 - RNA, 89 nt, synthetic construct
  source 1..89: mol_type = other RNA
acagcttatttggaagctgaaatgtgaggtttataacactcacaagaatcctgaaaaaggatgccaaacttggtatatatagagttaag

SEQ ID NO: 2377 - RNA, 89 nt, synthetic construct
  source 1..89: mol_type = other RNA
acagcttatttggaagctgaaatgtgaggtttataacactcacaagaatcctgaaaaaggatgccaaacggtctgcttccagaagaaaa

SEQ ID NO: 2378 - RNA, 89 nt, synthetic construct
  source 1..89: mol_type = other RNA
acagcttatttggaagctgaaatgtgaggtttataacactcacaagaatcctgaaaaaggatgccaaacgtttataatacagcaaagtt

SEQ ID NO: 2379 - RNA, 89 nt, synthetic construct
  source 1..89: mol_type = other RNA
acagcttatttggaagctgaaatgtgaggtttataacactcacaagaatcctgaaaaaggatgccaaacggacatggtcttaaagactt

SEQ ID NO: 2380 - RNA, 89 nt, synthetic construct
  source 1..89: mol_type = other RNA
acagcttatttggaagctgaaatgtgaggtttataacactcacaagaatcctgaaaaaggatgccaaacgttgctcatttctttgattt

SEQ ID NO: 2381 - RNA, 89 nt, synthetic construct
  source 1..89: mol_type = other RNA
acagcttatttggaagctgaaatgtgaggtttataacactcacaagaatcctgaaaaaggatgccaaactctccagagccaaaatcaag

SEQ ID NO: 2382 - RNA, 89 nt, synthetic construct
  source 1..89: mol_type = other RNA
acagcttatttggaagctgaaatgtgaggtttataacactcacaagaatcctgaaaaaggatgccaaacaactcaactcaaaacttgaa

SEQ ID NO: 2383 - RNA, 89 nt, synthetic construct
  source 1..89: mol_type = other RNA
acagcttatttggaagctgaaatgtgaggtttataacactcacaagaatcctgaaaaaggatgccaaacaaagcctcctagaagaaaaa

SEQ ID NO: 2384 - RNA, 89 nt, synthetic construct
  source 1..89: mol_type = other RNA
acagcttatttggaagctgaaatgtgaggtttataacactcacaagaatcctgaaaaaggatgccaaaccaagttaacacggcttaatg

SEQ ID NO: 2385 - RNA, 89 nt, synthetic construct
  source 1..89: mol_type = other RNA
acagcttatttggaagctgaaatgtgaggtttataacactcacaagaatcctgaaaaaggatgccaaacgacgatgtaaaaattttagc

SEQ ID NO: 2386 - RNA, 89 nt, synthetic construct
  source 1..89: mol_type = other RNA
acagcttatttggaagctgaaatgtgaggtttataacactcacaagaatcctgaaaaaggatgccaaacttgttcctctagttatttcc

SEQ ID NO: 2387 - RNA, 89 nt, synthetic construct
  source 1..89: mol_type = other RNA
acagcttatttggaagctgaaatgtgaggtttataacactcacaagaatcctgaaaaaggatgccaaacagaaatgcatacttaattca

SEQ ID NO: 2388 - RNA, 89 nt, synthetic construct
  source 1..89: mol_type = other RNA
acagcttatttggaagctgaaatgtgaggtttataacactcacaagaatcctgaaaaaggatgccaaacttcctctagttatttcctcc

SEQ ID NO: 2389 - RNA, 89 nt, synthetic construct
  source 1..89: mol_type = other RNA
acagcttatttggaagctgaaatgtgaggtttataacactcacaagaatcctgaaaaaggatgccaaacagacgaagggccaaattaat

SEQ ID NO: 2390 - RNA, 89 nt, synthetic construct
  source 1..89: mol_type = other RNA
acagcttatttggaagctgaaatgtgaggtttataacactcacaagaatcctgaaaaaggatgccaaacatgacatatttcaaaaactc

SEQ ID NO: 2391 - RNA, 89 nt, synthetic construct
  source 1..89: mol_type = other RNA
acagcttatttggaagctgaaatgtgaggtttataacactcacaagaatcctgaaaaaggatgccaaaccattcgtgcaagttaacacg

SEQ ID NO: 2392 - RNA, 89 nt, synthetic construct
  source 1..89: mol_type = other RNA
acagcttatttggaagctgaaatgtgaggtttataacactcacaagaatcctgaaaaaggatgccaaactaaaaattttagccaatggc

SEQ ID NO: 2393 - RNA, 89 nt, synthetic construct
  source 1..89: mol_type = other RNA
acagcttatttggaagctgaaatgtgaggtttataacactcacaagaatcctgaaaaaggatgccaaactttttgacttgtaaatctct

SEQ ID NO: 2394 - RNA, 89 nt, synthetic construct
  source 1..89: mol_type = other RNA
acagcttatttggaagctgaaatgtgaggtttataacactcacaagaatcctgaaaaaggatgccaaacaaatcaaagaagaagaaaag

SEQ ID NO: 2395 - RNA, 89 nt, synthetic construct
  source 1..89: mol_type = other RNA
acagcttatttggaagctgaaatgtgaggtttataacactcacaagaatcctgaaaaaggatgccaaacgcattgatctaactcaatgt

SEQ ID NO: 2396 - RNA, 89 nt, synthetic construct
  source 1..89: mol_type = other RNA
acagcttatttggaagctgaaatgtgaggtttataacactcacaagaatcctgaaaaaggatgccaaacttcacaattaagctccttct

SEQ ID NO: 2397 - RNA, 89 nt, synthetic construct
  source 1..89: mol_type = other RNA
acagcttatttggaagctgaaatgtgaggtttataacactcacaagaatcctgaaaaaggatgccaaacagttagttgctcatttcttt

SEQ ID NO: 2398 - RNA, 89 nt, synthetic construct
  source 1..89: mol_type = other RNA
acagcttatttggaagctgaaatgtgaggtttataacactcacaagaatcctgaaaaaggatgccaaacacatatttcaaaaactcaac

SEQ ID NO: 2399 - RNA, 89 nt, synthetic construct
  source 1..89: mol_type = other RNA
acagcttatttggaagctgaaatgtgaggtttataacactcacaagaatcctgaaaaaggatgccaaacgaatggatcactgtttccaa

SEQ ID NO: 2400 - RNA, 89 nt, synthetic construct
  source 1..89: mol_type = other RNA
acagcttatttggaagctgaaatgtgaggtttataacactcacaagaatcctgaaaaaggatgccaaacacaccacctgagggagtgga

SEQ ID NO: 2401 - RNA, 89 nt, synthetic construct
  source 1..89: mol_type = other RNA
acagcttatttggaagctgaaatgtgaggtttataacactcacaagaatcctgaaaaaggatgccaaacttttttggaatggatcactg

SEQ ID NO: 2402 - RNA, 89 nt, synthetic construct
  source 1..89: mol_type = other RNA
acagcttatttggaagctgaaatgtgaggtttataacactcacaagaatcctgaaaaaggatgccaaacaagactttgtccataagacg

SEQ ID NO: 2403 - RNA, 89 nt, synthetic construct
  source 1..89: mol_type = other RNA
acagcttatttggaagctgaaatgtgaggtttataacactcacaagaatcctgaaaaaggatgccaaactatagagttaagaagtctag

SEQ ID NO: 2404 - RNA, 89 nt, synthetic construct
  source 1..89: mol_type = other RNA
acagcttatttggaagctgaaatgtgaggtttataacactcacaagaatcctgaaaaaggatgccaaacgtcaccatagcattgaatgt

SEQ ID NO: 2405 - RNA, 89 nt, synthetic construct
  source 1..89: mol_type = other RNA
acagcttatttggaagctgaaatgtgaggtttataacactcacaagaatcctgaaaaaggatgccaaaccttcaacaaaaagtgaaata

SEQ ID NO: 2406 - RNA, 89 nt, synthetic construct
  source 1..89: mol_type = other RNA
acagcttatttggaagctgaaatgtgaggtttataacactcacaagaatcctgaaaaaggatgccaaacctatgttagacgatgtaaaa

SEQ ID NO: 2407 - RNA, 89 nt, synthetic construct
  source 1..89: mol_type = other RNA
acagcttatttggaagctgaaatgtgaggtttataacactcacaagaatcctgaaaaaggatgccaaacattctctatctccagagcca

SEQ ID NO: 2408 - RNA, 89 nt, synthetic construct
  source 1..89: mol_type = other RNA
acagcttatttggaagctgaaatgtgaggtttataacactcacaagaatcctgaaaaaggatgccaaactttagaagagcaactaacta

SEQ ID NO: 2409 - RNA, 89 nt, synthetic construct
  source 1..89: mol_type = other RNA
acagcttatttggaagctgaaatgtgaggtttataacactcacaagaatcctgaaaaaggatgccaaacaatttacccaacaaaaaagt

SEQ ID NO: 2410 - RNA, 89 nt, synthetic construct
  source 1..89: mol_type = other RNA
acagcttatttggaagctgaaatgtgaggtttataacactcacaagaatcctgaaaaaggatgccaaacattcattacttttttcccct

SEQ ID NO: 2411 - RNA, 89 nt, synthetic construct
  source 1..89: mol_type = other RNA
acagcttatttggaagctgaaatgtgaggtttataacactcacaagaatcctgaaaaaggatgccaaacaactacaagtcaaaaatgaa

SEQ ID NO: 2412 - RNA, 89 nt, synthetic construct
  source 1..89: mol_type = other RNA
acagcttatttggaagctgaaatgtgaggtttataacactcacaagaatcctgaaaaaggatgccaaacgttatttcctccagaattga

SEQ ID NO: 2413 - RNA, 89 nt, synthetic construct
  source 1..89: mol_type = other RNA
acagcttatttggaagctgaaatgtgaggtttataacactcacaagaatcctgaaaaaggatgccaaacacacggcttaatgattaact

SEQ ID NO: 2414 - RNA, 89 nt, synthetic construct
  source 1..89: mol_type = other RNA
acagcttatttggaagctgaaatgtgaggtttataacactcacaagaatcctgaaaaaggatgccaaacactatgttcacctaccaacc

SEQ ID NO: 2415 - RNA, 89 nt, synthetic construct
  source 1..89: mol_type = other RNA
acagcttatttggaagctgaaatgtgaggtttataacactcacaagaatcctgaaaaaggatgccaaacgtcttaaagactttgtccat

SEQ ID NO: 2416 - RNA, 89 nt, synthetic construct
  source 1..89: mol_type = other RNA
acagcttatttggaagctgaaatgtgaggtttataacactcacaagaatcctgaaaaaggatgccaaacatacagcaaagttaaataca

SEQ ID NO: 2417 - RNA, 89 nt, synthetic construct
  source 1..89: mol_type = other RNA
acagcttatttggaagctgaaatgtgaggtttataacactcacaagaatcctgaaaaaggatgccaaacccaaccttaccttttctggg

SEQ ID NO: 2418 - RNA, 89 nt, synthetic construct
  source 1..89: mol_type = other RNA
acagcttatttggaagctgaaatgtgaggtttataacactcacaagaatcctgaaaaaggatgccaaacaagtacagtttgagaaatgc

SEQ ID NO: 2419 - RNA, 89 nt, synthetic construct
  source 1..89: mol_type = other RNA
acagcttatttggaagctgaaatgtgaggtttataacactcacaagaatcctgaaaaaggatgccaaacatcagtctttttatgatcta

SEQ ID NO: 2420 - RNA, 89 nt, synthetic construct
  source 1..89: mol_type = other RNA
acagcttatttggaagctgaaatgtgaggtttataacactcacaagaatcctgaaaaaggatgccaaacagaagtctaggtctgcttcc

SEQ ID NO: 2421 - RNA, 89 nt, synthetic construct
  source 1..89: mol_type = other RNA
acagcttatttggaagctgaaatgtgaggtttataacactcacaagaatcctgaaaaaggatgccaaaccagcaaagttaaatacaatt

SEQ ID NO: 2422 - RNA, 89 nt, synthetic construct
  source 1..89: mol_type = other RNA
acagcttatttggaagctgaaatgtgaggtttataacactcacaagaatcctgaaaaaggatgccaaaccatataaactacaagtcaaa

SEQ ID NO: 2423 - RNA, 89 nt, synthetic construct
  source 1..89: mol_type = other RNA
acagcttatttggaagctgaaatgtgaggtttataacactcacaagaatcctgaaaaaggatgccaaacagaccatgtcccaactgaag

SEQ ID NO: 2424 - RNA, 89 nt, synthetic construct
  source 1..89: mol_type = other RNA
acagcttatttggaagctgaaatgtgaggtttataacactcacaagaatcctgaaaaaggatgccaaacaaaagactgatcaaatatgt

SEQ ID NO: 2425 - RNA, 89 nt, synthetic construct
  source 1..89: mol_type = other RNA
acagcttatttggaagctgaaatgtgaggtttataacactcacaagaatcctgaaaaaggatgccaaaccatcgtctaacatagcaaat

SEQ ID NO: 2426 - RNA, 89 nt, synthetic construct
  source 1..89: mol_type = other RNA
acagcttatttggaagctgaaatgtgaggtttataacactcacaagaatcctgaaaaaggatgccaaacgtaggtgaacatagttaatc

SEQ ID NO: 2427 - RNA, 89 nt, synthetic construct
  source 1..89: mol_type = other RNA
acagcttatttggaagctgaaatgtgaggtttataacactcacaagaatcctgaaaaaggatgccaaacttttcttctggaagcagacc

SEQ ID NO: 2428 - RNA, 89 nt, synthetic construct
  source 1..89: mol_type = other RNA
acagcttatttggaagctgaaatgtgaggtttataacactcacaagaatcctgaaaaaggatgccaaaccctgtttttaaaagctaatt

SEQ ID NO: 2429 - RNA, 89 nt, synthetic construct
  source 1..89: mol_type = other RNA
acagcttatttggaagctgaaatgtgaggtttataacactcacaagaatcctgaaaaaggatgccaaacgaggaacaataaaaagaagg

SEQ ID NO: 2430 - RNA, 89 nt, synthetic construct
  source 1..89: mol_type = other RNA
acagcttatttggaagctgaaatgtgaggtttataacactcacaagaatcctgaaaaaggatgccaaactgtagttcttctcagttcct

SEQ ID NO: 2431 - RNA, 89 nt, synthetic construct
  source 1..89: mol_type = other RNA
acagcttatttggaagctgaaatgtgaggtttataacactcacaagaatcctgaaaaaggatgccaaactactttagttcttttggaaa

SEQ ID NO: 2432 - RNA, 89 nt, synthetic construct
  source 1..89: mol_type = other RNA
acagcttatttggaagctgaaatgtgaggtttataacactcacaagaatcctgaaaaaggatgccaaacgatcataaaaagactgatca

SEQ ID NO: 2433 - RNA, 89 nt, synthetic construct
  source 1..89: mol_type = other RNA
acagcttatttggaagctgaaatgtgaggtttataacactcacaagaatcctgaaaaaggatgccaaacacatagcaaatcttgatttt

SEQ ID NO: 2434 - RNA, 89 nt, synthetic construct
  source 1..89: mol_type = other RNA
acagcttatttggaagctgaaatgtgaggtttataacactcacaagaatcctgaaaaaggatgccaaacctgtgttcctctggtactct

SEQ ID NO: 2435 - RNA, 89 nt, synthetic construct
  source 1..89: mol_type = other RNA
acagcttatttggaagctgaaatgtgaggtttataacactcacaagaatcctgaaaaaggatgccaaacgagaatcaaatgatgaattg

SEQ ID NO: 2436 - RNA, 89 nt, synthetic construct
  source 1..89: mol_type = other RNA
acagcttatttggaagctgaaatgtgaggtttataacactcacaagaatcctgaaaaaggatgccaaacagtatgcatttctcaaactg

SEQ ID NO: 2437 - RNA, 89 nt, synthetic construct
  source 1..89: mol_type = other RNA
acagcttatttggaagctgaaatgtgaggtttataacactcacaagaatcctgaaaaaggatgccaaactgttgagtttttgaaatatg

SEQ ID NO: 2438 - RNA, 89 nt, synthetic construct
  source 1..89: mol_type = other RNA
acagcttatttggaagctgaaatgtgaggtttataacactcacaagaatcctgaaaaaggatgccaaactgttcctctggtactctgta

SEQ ID NO: 2439 - RNA, 89 nt, synthetic construct
  source 1..89: mol_type = other RNA
acagcttatttggaagctgaaatgtgaggtttataacactcacaagaatcctgaaaaaggatgccaaacacatattctttacctcttca

SEQ ID NO: 2440 - RNA, 89 nt, synthetic construct
  source 1..89: mol_type = other RNA
acagcttatttggaagctgaaatgtgaggtttataacactcacaagaatcctgaaaaaggatgccaaacttaaagttgaggggaaaaaa

SEQ ID NO: 2441 - RNA, 89 nt, synthetic construct
  source 1..89: mol_type = other RNA
acagcttatttggaagctgaaatgtgaggtttataacactcacaagaatcctgaaaaaggatgccaaacaggggaaaaaagtaatgaat

SEQ ID NO: 2442 - RNA, 89 nt, synthetic construct
  source 1..89: mol_type = other RNA
acagcttatttggaagctgaaatgtgaggtttataacactcacaagaatcctgaaaaaggatgccaaacaaggaggccattggctaaaa

SEQ ID NO: 2443 - RNA, 89 nt, synthetic construct
  source 1..89: mol_type = other RNA
acagcttatttggaagctgaaatgtgaggtttataacactcacaagaatcctgaaaaaggatgccaaacgtttatatgtagttcttctc

SEQ ID NO: 2444 - RNA, 89 nt, synthetic construct
  source 1..89: mol_type = other RNA
acagcttatttggaagctgaaatgtgaggtttataacactcacaagaatcctgaaaaaggatgccaaacaaaagaaggagcttaattgt

SEQ ID NO: 2445 - RNA, 89 nt, synthetic construct
  source 1..89: mol_type = other RNA
acagcttatttggaagctgaaatgtgaggtttataacactcacaagaatcctgaaaaaggatgccaaactgtcattaatttggcccttc

SEQ ID NO: 2446 - RNA, 89 nt, synthetic construct
  source 1..89: mol_type = other RNA
acagcttatttggaagctgaaatgtgaggtttataacactcacaagaatcctgaaaaaggatgccaaacgaaacagtgatccattccaa

SEQ ID NO: 2447 - RNA, 89 nt, synthetic construct
  source 1..89: mol_type = other RNA
acagcttatttggaagctgaaatgtgaggtttataacactcacaagaatcctgaaaaaggatgccaaacctgtattataaactacacat

SEQ ID NO: 2448 - RNA, 89 nt, synthetic construct
  source 1..89: mol_type = other RNA
acagcttatttggaagctgaaatgtgaggtttataacactcacaagaatcctgaaaaaggatgccaaacttgagtttttgaaatatgtc

SEQ ID NO: 2449 - RNA, 89 nt, synthetic construct
  source 1..89: mol_type = other RNA
acagcttatttggaagctgaaatgtgaggtttataacactcacaagaatcctgaaaaaggatgccaaacactttgctgtattataaact

SEQ ID NO: 2450 - RNA, 89 nt, synthetic construct
  source 1..89: mol_type = other RNA
acagcttatttggaagctgaaatgtgaggtttataacactcacaagaatcctgaaaaaggatgccaaactaaactacacattcaatgct

SEQ ID NO: 2451 - RNA, 89 nt, synthetic construct
  source 1..89: mol_type = other RNA
acagcttatttggaagctgaaatgtgaggtttataacactcacaagaatcctgaaaaaggatgccaaactaaccttcttccacattgag

SEQ ID NO: 2452 - RNA, 89 nt, synthetic construct
  source 1..89: mol_type = other RNA
acagcttatttggaagctgaaatgtgaggtttataacactcacaagaatcctgaaaaaggatgccaaacgagatagagaatcaaatgat

SEQ ID NO: 2453 - RNA, 89 nt, synthetic construct
  source 1..89: mol_type = other RNA
acagcttatttggaagctgaaatgtgaggtttataacactcacaagaatcctgaaaaaggatgccaaacacttgcacgaatgtaacctt

SEQ ID NO: 2454 - RNA, 89 nt, synthetic construct
  source 1..89: mol_type = other RNA
acagcttatttggaagctgaaatgtgaggtttataacactcacaagaatcctgaaaaaggatgccaaacagccgtgttaacttgcacga

SEQ ID NO: 2455 - RNA, 89 nt, synthetic construct
  source 1..89: mol_type = other RNA
acagcttatttggaagctgaaatgtgaggtttataacactcacaagaatcctgaaaaaggatgccaaacaactacacattcaatgctat

SEQ ID NO: 2456 - RNA, 89 nt, synthetic construct
  source 1..89: mol_type = other RNA
acagcttatttggaagctgaaatgtgaggtttataacactcacaagaatcctgaaaaaggatgccaaacctatggtgactacctgtttt

SEQ ID NO: 2457 - RNA, 89 nt, synthetic construct
  source 1..89: mol_type = other RNA
acagcttatttggaagctgaaatgtgaggtttataacactcacaagaatcctgaaaaaggatgccaaacgttaatcattaagccgtgtt

SEQ ID NO: 2458 - RNA, 89 nt, synthetic construct
  source 1..89: mol_type = other RNA
acagcttatttggaagctgaaatgtgaggtttataacactcacaagaatcctgaaaaaggatgccaaacatttcactggtttgcagcga

SEQ ID NO: 2459 - RNA, 89 nt, synthetic construct
  source 1..89: mol_type = other RNA
acagcttatttggaagctgaaatgtgaggtttataacactcacaagaatcctgaaaaaggatgccaaacgcccttcgtcttatggacaa

SEQ ID NO: 2460 - RNA, 89 nt, synthetic construct
  source 1..89: mol_type = other RNA
acagcttatttggaagctgaaatgtgaggtttataacactcacaagaatcctgaaaaaggatgccaaacactagaggaacaataaaaag

SEQ ID NO: 2461 - RNA, 89 nt, synthetic construct
  source 1..89: mol_type = other RNA
acagcttatttggaagctgaaatgtgaggtttataacactcacaagaatcctgaaaaaggatgccaaacgacttcttaactctatatat

SEQ ID NO: 2462 - RNA, 89 nt, synthetic construct
  source 1..89: mol_type = other RNA
acagcttatttggaagctgaaatgtgaggtttataacactcacaagaatcctgaaaaaggatgccaaacatgaattaagtatgcatttc

SEQ ID NO: 2463 - RNA, 89 nt, synthetic construct
  source 1..89: mol_type = other RNA
acagcttatttggaagctgaaatgtgaggtttataacactcacaagaatcctgaaaaaggatgccaaactagttcttctcagttccttt

SEQ ID NO: 2464 - RNA, 89 nt, synthetic construct
  source 1..89: mol_type = other RNA
acagcttatttggaagctgaaatgtgaggtttataacactcacaagaatcctgaaaaaggatgccaaacgaagcagacctagacttctt

SEQ ID NO: 2465 - RNA, 89 nt, synthetic construct
  source 1..89: mol_type = other RNA
acagcttatttggaagctgaaatgtgaggtttataacactcacaagaatcctgaaaaaggatgccaaacggaggctttcaagttttgag

SEQ ID NO: 2466 - RNA, 89 nt, synthetic construct
  source 1..89: mol_type = other RNA
acagcttatttggaagctgaaatgtgaggtttataacactcacaagaatcctgaaaaaggatgccaaacaccttcttccacattgagtt

SEQ ID NO: 2467 - RNA, 89 nt, synthetic construct
  source 1..89: mol_type = other RNA
acagcttatttggaagctgaaatgtgaggtttataacactcacaagaatcctgaaaaaggatgccaaacgaactgttttcttctggaag

SEQ ID NO: 2468 - RNA, 89 nt, synthetic construct
  source 1..89: mol_type = other RNA
acagcttatttggaagctgaaatgtgaggtttataacactcacaagaatcctgaaaaaggatgccaaacaaatttttacatcgtctaac

SEQ ID NO: 2469 - RNA, 89 nt, synthetic construct
  source 1..89: mol_type = other RNA
acagcttatttggaagctgaaatgtgaggtttataacactcacaagaatcctgaaaaaggatgccaaacagttcaagtgacatattctt

SEQ ID NO: 2470 - RNA, 89 nt, synthetic construct
  source 1..89: mol_type = other RNA
acagcttatttggaagctgaaatgtgaggtttataacactcacaagaatcctgaaaaaggatgccaaacgtgttacggctctcaatgct

SEQ ID NO: 2471 - RNA, 89 nt, synthetic construct
  source 1..89: mol_type = other RNA
acagcttatttggaagctgaaatgtgaggtttataacactcacaagaatcctgaaaaaggatgccaaacacttgtagtttatatgtagt

SEQ ID NO: 2472 - RNA, 89 nt, synthetic construct
  source 1..89: mol_type = other RNA
acagcttatttggaagctgaaatgtgaggtttataacactcacaagaatcctgaaaaaggatgccaaactagtttatatgtagttcttc

SEQ ID NO: 2473 - RNA, 89 nt, synthetic construct
  source 1..89: mol_type = other RNA
acagcttatttggaagctgaaatgtgaggtttataacactcacaagaatcctgaaaaaggatgccaaacttaacttgcacgaatgtaac

SEQ ID NO: 2474 - RNA, 89 nt, synthetic construct
  source 1..89: mol_type = other RNA
acagcttatttggaagctgaaatgtgaggtttataacactcacaagaatcctgaaaaaggatgccaaacaagcctttctccactccctc

SEQ ID NO: 2475 - RNA, 89 nt, synthetic construct
  source 1..89: mol_type = other RNA
acagcttatttggaagctgaaatgtgaggtttataacactcacaagaatcctgaaaaaggatgccaaacgatcaatgctaaatgaaatc

SEQ ID NO: 2476 - RNA, 89 nt, synthetic construct
  source 1..89: mol_type = other RNA
acagcttatttggaagctgaaatgtgaggtttataacactcacaagaatcctgaaaaaggatgccaaactggacaaagtctttaagacc

SEQ ID NO: 2477 - RNA, 89 nt, synthetic construct
  source 1..89: mol_type = other RNA
acagcttatttggaagctgaaatgtgaggtttataacactcacaagaatcctgaaaaaggatgccaaacaacttttttgttgggtaaat

SEQ ID NO: 2478 - RNA, 89 nt, synthetic construct
  source 1..89: mol_type = other RNA
acagcttatttggaagctgaaatgtgaggtttataacactcacaagaatcctgaaaaaggatgccaaaccctcttcatttttgacttgt

SEQ ID NO: 2479 - RNA, 89 nt, synthetic construct
  source 1..89: mol_type = other RNA
acagcttatttggaagctgaaatgtgaggtttataacactcacaagaatcctgaaaaaggatgccaaacagagatttacaagtcaaaaa

SEQ ID NO: 2480 - RNA, 89 nt, synthetic construct
  source 1..89: mol_type = other RNA
acagcttatttggaagctgaaatgtgaggtttataacactcacaagaatcctgaaaaaggatgccaaacttacggctctcaatgctgtg

SEQ ID NO: 2481 - RNA, 89 nt, synthetic construct
  source 1..89: mol_type = other RNA
acagcttatttggaagctgaaatgtgaggtttataacactcacaagaatcctgaaaaaggatgccaaaccccagaaaaggtaaggttgg

SEQ ID NO: 2482 - RNA, 89 nt, synthetic construct
  source 1..89: mol_type = other RNA
acagcttatttggaagctgaaatgtgaggtttataacactcacaagaatcctgaaaaaggatgccaaactcttgattttcaatttcaag

SEQ ID NO: 2483 - RNA, 89 nt, synthetic construct
  source 1..89: mol_type = other RNA
acagcttatttggaagctgaaatgtgaggtttataacactcacaagaatcctgaaaaaggatgccaaaccagcgatagatcataaaaag

SEQ ID NO: 2484 - RNA, 89 nt, synthetic construct
  source 1..89: mol_type = other RNA
acagcttatttggaagctgaaatgtgaggtttataacactcacaagaatcctgaaaaaggatgccaaaccacgaatgtaaccttcttcc

SEQ ID NO: 2485 - RNA, 89 nt, synthetic construct
  source 1..89: mol_type = other RNA
acagcttatttggaagctgaaatgtgaggtttataacactcacaagaatcctgaaaaaggatgccaaacagttagatcaatgctaaatg

SEQ ID NO: 2486 - RNA, 89 nt, synthetic construct
  source 1..89: mol_type = other RNA
acagcttatttggaagctgaaatgtgaggtttataacactcacaagaatcctgaaaaaggatgccaaacgttagttgctcttctaaata

SEQ ID NO: 2487 - RNA, 89 nt, synthetic construct
  source 1..89: mol_type = other RNA
acagcttatttggaagctgaaatgtgaggtttataacactcacaagaatcctgaaaaaggatgccaaactttcactttttgttgaagta

SEQ ID NO: 2488 - RNA, 89 nt, synthetic construct
  source 1..89: mol_type = other RNA
acagcttatttggaagctgaaatgtgaggtttataacactcacaagaatcctgaaaaaggatgccaaactatataccaatatttgccca

SEQ ID NO: 2489 - RNA, 89 nt, synthetic construct
  source 1..89: mol_type = other RNA
acagcttatttggaagctgaaatgtgaggtttataacactcacaagaatcctgaaaaaggatgccaaactatgtagttcttctcagttc

SEQ ID NO: 2490 - RNA, 89 nt, synthetic construct
  source 1..89: mol_type = other RNA
acagcttatttggaagctgaaatgtgaggtttataacactcacaagaatcctgaaaaaggatgccaaacgacaaagtctttaagaccat

SEQ ID NO: 2491 - RNA, 89 nt, synthetic construct
  source 1..89: mol_type = other RNA
acagcttatttggaagctgaaatgtgaggtttataacactcacaagaatcctgaaaaaggatgccaaactggtgactacctgtttttaa

SEQ ID NO: 2492 - RNA, 89 nt, synthetic construct
  source 1..89: mol_type = other RNA
acagcttatttggaagctgaaatgtgaggtttataacactcacaagaatcctgaaaaaggatgccaaacaatgaaatcaaagaaatgag

SEQ ID NO: 2493 - RNA, 89 nt, synthetic construct
  source 1..89: mol_type = other RNA
acagcttatttggaagctgaaatgtgaggtttataacactcacaagaatcctgaaaaaggatgccaaacgttgctcttctaaatatttc

SEQ ID NO: 2494 - RNA, 89 nt, synthetic construct
  source 1..89: mol_type = other RNA
acagcttatttggaagctgaaatgtgaggtttataacactcacaagaatcctgaaaaaggatgccaaaccggctctcaatgctgtgttc

SEQ ID NO: 2495 - RNA, 89 nt, synthetic construct
  source 1..89: mol_type = other RNA
acagcttatttggaagctgaaatgtgaggtttataacactcacaagaatcctgaaaaaggatgccaaactcttgatcaattctggagga

SEQ ID NO: 2496 - RNA, 89 nt, synthetic construct
  source 1..89: mol_type = other RNA
acagcttatttggaagctgaaatgtgaggtttataacactcacaagaatcctgaaaaaggatgccaaacctcttctaaatatttcactt

SEQ ID NO: 2497 - RNA, 89 nt, synthetic construct
  source 1..89: mol_type = other RNA
acagcttatttggaagctgaaatgtgaggtttataacactcacaagaatcctgaaaaaggatgccaaacgctaaaatttttacatcgtc

SEQ ID NO: 2498 - RNA, 89 nt, synthetic construct
  source 1..89: mol_type = other RNA
acagcttatttggaagctgaaatgtgaggtttataacactcacaagaatcctgaaaaaggatgccaaacaattaagttagttagttgct

SEQ ID NO: 2499 - RNA, 89 nt, synthetic construct
  source 1..89: mol_type = other RNA
acagcttatttggaagctgaaatgtgaggtttataacactcacaagaatcctgaaaaaggatgccaaacattttcaatttcaagcaacg

SEQ ID NO: 2500 - RNA, 89 nt, synthetic construct
  source 1..89: mol_type = other RNA
acagcttatttggaagctgaaatgtgaggtttataacactcacaagaatcctgaaaaaggatgccaaacatcattaagccgtgttaact

SEQ ID NO: 2501 - RNA, 89 nt, synthetic construct
  source 1..89: mol_type = other RNA
acagcttatttggaagctgaaatgtgaggtttataacactcacaagaatcctgaaaaaggatgccaaacagttagttagttgctcttct

SEQ ID NO: 2502 - RNA, 89 nt, synthetic construct
  source 1..89: mol_type = other RNA
acagcttatttggaagctgaaatgtgaggtttataacactcacaagaatcctgaaaaaggatgccaaacgctctggagatagagaatca

SEQ ID NO: 2503 - RNA, 89 nt, synthetic construct
  source 1..89: mol_type = other RNA
acagcttatttggaagctgaaatgtgaggtttataacactcacaagaatcctgaaaaaggatgccaaacgaggaaataactagaggaac

SEQ ID NO: 2504 - RNA, 89 nt, synthetic construct
  source 1..89: mol_type = other RNA
acagcttatttggaagctgaaatgtgaggtttataacactcacaagaatcctgaaaaaggatgccaaacaagttgaggggaaaaaagta

SEQ ID NO: 2505 - RNA, 89 nt, synthetic construct
  source 1..89: mol_type = other RNA
acagcttatttggaagctgaaatgtgaggtttataacactcacaagaatcctgaaaaaggatgccaaactttgcccagaaaaggtaagg

SEQ ID NO: 2506 - RNA, 89 nt, synthetic construct
  source 1..89: mol_type = other RNA
acagcttatttggaagctgaaatgtgaggtttataacactcacaagaatcctgaaaaaggatgccaaacatccattccaaaaaacactt

SEQ ID NO: 2507 - RNA, 89 nt, synthetic construct
  source 1..89: mol_type = other RNA
acagcttatttggaagctgaaatgtgaggtttataacactcacaagaatcctgaaaaaggatgccaaacttattaaagttgaggggaaa

SEQ ID NO: 2508 - RNA, 89 nt, synthetic construct
  source 1..89: mol_type = other RNA
acagcttatttggaagctgaaatgtgaggtttataacactcacaagaatcctgaaaaaggatgccaaacatgaattgtcttgatcaatt

SEQ ID NO: 2509 - RNA, 89 nt, synthetic construct
  source 1..89: mol_type = other RNA
acagcttatttggaagctgaaatgtgaggtttataacactcacaagaatcctgaaaaaggatgccaaacctttagttcttttggaaaca

SEQ ID NO: 2510 - RNA, 89 nt, synthetic construct
  source 1..89: mol_type = other RNA
acagcttatttggaagctgaaatgtgaggtttataacactcacaagaatcctgaaaaaggatgccaaactgcatttctcaaactgtact

SEQ ID NO: 2511 - RNA, 89 nt, synthetic construct
  source 1..89: mol_type = other RNA
acagcttatttggaagctgaaatgtgaggtttataacactcacaagaatcctgaaaaaggatgccaaacaattaagtatgcatttctca

SEQ ID NO: 2512 - RNA, 89 nt, synthetic construct
  source 1..89: mol_type = other RNA
acagcttatttggaagctgaaatgtgaggtttataacactcacaagaatcctgaaaaaggatgccaaactcattaatttggcccttcgt

SEQ ID NO: 2513 - RNA, 89 nt, synthetic construct
  source 1..89: mol_type = other RNA
acagcttatttggaagctgaaatgtgaggtttataacactcacaagaatcctgaaaaaggatgccaaacatttggcccttcgtcttatg

SEQ ID NO: 2514 - RNA, 89 nt, synthetic construct
  source 1..89: mol_type = other RNA
acagcttatttggaagctgaaatgtgaggtttataacactcacaagaatcctgaaaaaggatgccaaactaccaatatttgcccagaaa

SEQ ID NO: 2515 - RNA, 89 nt, synthetic construct
  source 1..89: mol_type = other RNA
acagcttatttggaagctgaaatgtgaggtttataacactcacaagaatcctgaaaaaggatgccaaacagttgagttcaagtgacata

SEQ ID NO: 2516 - RNA, 89 nt, synthetic construct
  source 1..89: mol_type = other RNA
acagcttatttggaagctgaaatgtgaggtttataacactcacaagaatcctgaaaaaggatgccaaacgtgactacctgtttttaaaa

SEQ ID NO: 2517 - RNA, 89 nt, synthetic construct
  source 1..89: mol_type = other RNA
acagcttatttggaagctgaaatgtgaggtttataacactcacaagaatcctgaaaaaggatgccaaacactacctgtttttaaaagct

SEQ ID NO: 2518 - RNA, 89 nt, synthetic construct
  source 1..89: mol_type = other RNA
acagcttatttggaagctgaaatgtgaggtttataacactcacaagaatcctgaaaaaggatgccaaaccatttctcaaactgtacttt

SEQ ID NO: 2519 - RNA, 89 nt, synthetic construct
  source 1..89: mol_type = other RNA
acagcttatttggaagctgaaatgtgaggtttataacactcacaagaatcctgaaaaaggatgccaaacgcaaatcttgattttggctc

SEQ ID NO: 2520 - RNA, 89 nt, synthetic construct
  source 1..89: mol_type = other RNA
acagcttatttggaagctgaaatgtgaggtttataacactcacaagaatcctgaaaaaggatgccaaacaggttggtaggtgaacatag

SEQ ID NO: 2521 - RNA, 89 nt, synthetic construct
  source 1..89: mol_type = other RNA
acagcttatttggaagctgaaatgtgaggtttataacactcacaagaatcctgaaaaaggatgccaaacgttcttctcagttccttttc

SEQ ID NO: 2522 - RNA, 89 nt, synthetic construct
  source 1..89: mol_type = other RNA
acagcttatttggaagctgaaatgtgaggtttataacactcacaagaatcctgaaaaaggatgccaaacaacatagttaatcattaagc

SEQ ID NO: 2523 - RNA, 89 nt, synthetic construct
  source 1..89: mol_type = other RNA
acagcttatttggaagctgaaatgtgaggtttataacactcacaagaatcctgaaaaaggatgccaaacaaatatgtcattaatttggc

SEQ ID NO: 2524 - RNA, 89 nt, synthetic construct
  source 1..89: mol_type = other RNA
acagcttatttggaagctgaaatgtgaggtttataacactcacaagaatcctgaaaaaggatgccaaacagcaactaacttaataggta

SEQ ID NO: 2525 - RNA, 89 nt, synthetic construct
  source 1..89: mol_type = other RNA
acagcttatttggaagctgaaatgtgaggtttataacactcacaagaatcctgaaaaaggatgccaaaccacattcaatgctatggtga

SEQ ID NO: 2526 - RNA, 89 nt, synthetic construct
  source 1..89: mol_type = other RNA
acagcttatttggaagctgaaatgtgaggtttataacactcacaagaatcctgaaaaaggatgccaaacatcaattctggaggaaataa

SEQ ID NO: 2527 - RNA, 89 nt, synthetic construct
  source 1..89: mol_type = other RNA
acagcttatttggaagctgaaatgtgaggtttataacactcacaagaatcctgaaaaaggatgccaaacttctttacctcttcattttt

SEQ ID NO: 2528 - RNA, 89 nt, synthetic construct
  source 1..89: mol_type = other RNA
acagcttatttggaagctgaaatgtgaggtttataacactcacaagaatcctgaaaaaggatgccaaacaaatcaaagaaatgagcaac

SEQ ID NO: 2529 - RNA, 89 nt, synthetic construct
  source 1..89: mol_type = other RNA
acagcttatttggaagctgaaatgtgaggtttataacactcacaagaatcctgaaaaaggatgccaaacaattgtcttgatcaattctg

SEQ ID NO: 2530 - RNA, 89 nt, synthetic construct
  source 1..89: mol_type = other RNA
acagcttatttggaagctgaaatgtgaggtttataacactcacaagaatcctgaaaaaggatgccaaactataccaatatttgcccaga

SEQ ID NO: 2531 - RNA, 89 nt, synthetic construct
  source 1..89: mol_type = other RNA
acagcttatttggaagctgaaatgtgaggtttataacactcacaagaatcctgaaaaaggatgccaaacggtgaacatagttaatcatt

SEQ ID NO: 2532 - RNA, 89 nt, synthetic construct
  source 1..89: mol_type = other RNA
acagcttatttggaagctgaaatgtgaggtttataacactcacaagaatcctgaaaaaggatgccaaacattttggctctggagataga

SEQ ID NO: 2533 - RNA, 89 nt, synthetic construct
  source 1..89: mol_type = other RNA
acagcttatttggaagctgaaatgtgaggtttataacactcacaagaatcctgaaaaaggatgccaaactcccaactgaaggaggccat

SEQ ID NO: 2534 - RNA, 89 nt, synthetic construct
  source 1..89: mol_type = other RNA
acagcttatttggaagctgaaatgtgaggtttataacactcacaagaatcctgaaaaaggatgccaaacgtttgcagcgatagatcata

SEQ ID NO: 2535 - RNA, 89 nt, synthetic construct
  source 1..89: mol_type = other RNA
acagcttatttggaagctgaaatgtgaggtttataacactcacaagaatcctgaaaaaggatgccaaacccaatatttgcccagaaaag

SEQ ID NO: 2536 - RNA, 89 nt, synthetic construct
  source 1..89: mol_type = other RNA
acagcttatttggaagctgaaatgtgaggtttataacactcacaagaatcctgaaaaaggatgccaaacgttcttttggaaacagtgat

SEQ ID NO: 2537 - RNA, 89 nt, synthetic construct
  source 1..89: mol_type = other RNA
acagcttatttggaagctgaaatgtgaggtttataacactcacaagaatcctgaaaaaggatgccaaacgaattttttcttctaggagg

SEQ ID NO: 2538 - RNA, 89 nt, synthetic construct
  source 1..89: mol_type = other RNA
acagcttatttggaagctgaaatgtgaggtttataacactcacaagaatcctgaaaaaggatgccaaacacaggctccttcacagaagc

SEQ ID NO: 2539 - RNA, 89 nt, synthetic construct
  source 1..89: mol_type = other RNA
acagcttatttggaagctgaaatgtgaggtttataacactcacaagaatcctgaaaaaggatgccaaacctctgcagaacgggacatct

SEQ ID NO: 2540 - RNA, 89 nt, synthetic construct
  source 1..89: mol_type = other RNA
acagcttatttggaagctgaaatgtgaggtttataacactcacaagaatcctgaaaaaggatgccaaacgccccccccacaccaggaac

SEQ ID NO: 2541 - RNA, 89 nt, synthetic construct
  source 1..89: mol_type = other RNA
acagcttatttggaagctgaaatgtgaggtttataacactcacaagaatcctgaaaaaggatgccaaacatatgctgagaaacaatagg

SEQ ID NO: 2542 - RNA, 89 nt, synthetic construct
  source 1..89: mol_type = other RNA
acagcttatttggaagctgaaatgtgaggtttataacactcacaagaatcctgaaaaaggatgccaaacggcagggattagtgagagaa

SEQ ID NO: 2543 - RNA, 89 nt, synthetic construct
  source 1..89: mol_type = other RNA
acagcttatttggaagctgaaatgtgaggtttataacactcacaagaatcctgaaaaaggatgccaaacgacctcaggcctgctttaca

SEQ ID NO: 2544 - RNA, 89 nt, synthetic construct
  source 1..89: mol_type = other RNA
acagcttatttggaagctgaaatgtgaggtttataacactcacaagaatcctgaaaaaggatgccaaaccagaacgggacatctactct

SEQ ID NO: 2545 - RNA, 89 nt, synthetic construct
  source 1..89: mol_type = other RNA
acagcttatttggaagctgaaatgtgaggtttataacactcacaagaatcctgaaaaaggatgccaaacgagtagctagctgcttctag

SEQ ID NO: 2546 - RNA, 89 nt, synthetic construct
  source 1..89: mol_type = other RNA
acagcttatttggaagctgaaatgtgaggtttataacactcacaagaatcctgaaaaaggatgccaaacgtgccactgtggagcaacgg

SEQ ID NO: 2547 - RNA, 89 nt, synthetic construct
  source 1..89: mol_type = other RNA
acagcttatttggaagctgaaatgtgaggtttataacactcacaagaatcctgaaaaaggatgccaaacgggaatctgtggtgccactg

SEQ ID NO: 2548 - RNA, 89 nt, synthetic construct
  source 1..89: mol_type = other RNA
acagcttatttggaagctgaaatgtgaggtttataacactcacaagaatcctgaaaaaggatgccaaacgtgagagcttctccctccag

SEQ ID NO: 2549 - RNA, 89 nt, synthetic construct
  source 1..89: mol_type = other RNA
acagcttatttggaagctgaaatgtgaggtttataacactcacaagaatcctgaaaaaggatgccaaacgctccaggatgggacagcgg

SEQ ID NO: 2550 - RNA, 89 nt, synthetic construct
  source 1..89: mol_type = other RNA
acagcttatttggaagctgaaatgtgaggtttataacactcacaagaatcctgaaaaaggatgccaaacctgagaaacaataggtttct

SEQ ID NO: 2551 - RNA, 89 nt, synthetic construct
  source 1..89: mol_type = other RNA
acagcttatttggaagctgaaatgtgaggtttataacactcacaagaatcctgaaaaaggatgccaaacacctgttttatattggctcc

SEQ ID NO: 2552 - RNA, 89 nt, synthetic construct
  source 1..89: mol_type = other RNA
acagcttatttggaagctgaaatgtgaggtttataacactcacaagaatcctgaaaaaggatgccaaacagattgcccatgcttttcac

SEQ ID NO: 2553 - RNA, 89 nt, synthetic construct
  source 1..89: mol_type = other RNA
acagcttatttggaagctgaaatgtgaggtttataacactcacaagaatcctgaaaaaggatgccaaacgggtggaaggtggagtatag

SEQ ID NO: 2554 - RNA, 89 nt, synthetic construct
  source 1..89: mol_type = other RNA
acagcttatttggaagctgaaatgtgaggtttataacactcacaagaatcctgaaaaaggatgccaaacccaaaggcttctaatagctc

SEQ ID NO: 2555 - RNA, 89 nt, synthetic construct
  source 1..89: mol_type = other RNA
acagcttatttggaagctgaaatgtgaggtttataacactcacaagaatcctgaaaaaggatgccaaacagacaggaaaagacagggga

SEQ ID NO: 2556 - RNA, 89 nt, synthetic construct
  source 1..89: mol_type = other RNA
acagcttatttggaagctgaaatgtgaggtttataacactcacaagaatcctgaaaaaggatgccaaacgacccagccccccaagtggg

SEQ ID NO: 2557 - RNA, 89 nt, synthetic construct
  source 1..89: mol_type = other RNA
acagcttatttggaagctgaaatgtgaggtttataacactcacaagaatcctgaaaaaggatgccaaacccgtagctgggcagggatta

SEQ ID NO: 2558 - RNA, 89 nt, synthetic construct
  source 1..89: mol_type = other RNA
acagcttatttggaagctgaaatgtgaggtttataacactcacaagaatcctgaaaaaggatgccaaaccagtagacccagccccccaa

SEQ ID NO: 2559 - RNA, 89 nt, synthetic construct
  source 1..89: mol_type = other RNA
acagcttatttggaagctgaaatgtgaggtttataacactcacaagaatcctgaaaaaggatgccaaacggtggtgagagcttctccct

SEQ ID NO: 2560 - RNA, 89 nt, synthetic construct
  source 1..89: mol_type = other RNA
acagcttatttggaagctgaaatgtgaggtttataacactcacaagaatcctgaaaaaggatgccaaacgaatggaatggggaatctgt

SEQ ID NO: 2561 - RNA, 89 nt, synthetic construct
  source 1..89: mol_type = other RNA
acagcttatttggaagctgaaatgtgaggtttataacactcacaagaatcctgaaaaaggatgccaaacgatggctgggtggtgagagc

SEQ ID NO: 2562 - RNA, 89 nt, synthetic construct
  source 1..89: mol_type = other RNA
acagcttatttggaagctgaaatgtgaggtttataacactcacaagaatcctgaaaaaggatgccaaactggagcaacggaggaagtgg

SEQ ID NO: 2563 - RNA, 89 nt, synthetic construct
  source 1..89: mol_type = other RNA
acagcttatttggaagctgaaatgtgaggtttataacactcacaagaatcctgaaaaaggatgccaaacgcctccctttccccagcttc

SEQ ID NO: 2564 - RNA, 89 nt, synthetic construct
  source 1..89: mol_type = other RNA
acagcttatttggaagctgaaatgtgaggtttataacactcacaagaatcctgaaaaaggatgccaaacggtcatgaatcccaagcctt

SEQ ID NO: 2565 - RNA, 89 nt, synthetic construct
  source 1..89: mol_type = other RNA
acagcttatttggaagctgaaatgtgaggtttataacactcacaagaatcctgaaaaaggatgccaaacgctagctgcttctagggata

SEQ ID NO: 2566 - RNA, 89 nt, synthetic construct
  source 1..89: mol_type = other RNA
acagcttatttggaagctgaaatgtgaggtttataacactcacaagaatcctgaaaaaggatgccaaacgcccatagcctccctttccc

SEQ ID NO: 2567 - RNA, 89 nt, synthetic construct
  source 1..89: mol_type = other RNA
acagcttatttggaagctgaaatgtgaggtttataacactcacaagaatcctgaaaaaggatgccaaacgagaccatgagtcccaagcc

SEQ ID NO: 2568 - RNA, 89 nt, synthetic construct
  source 1..89: mol_type = other RNA
acagcttatttggaagctgaaatgtgaggtttataacactcacaagaatcctgaaaaaggatgccaaactgacctgttttatattggct

SEQ ID NO: 2569 - RNA, 89 nt, synthetic construct
  source 1..89: mol_type = other RNA
acagcttatttggaagctgaaatgtgaggtttataacactcacaagaatcctgaaaaaggatgccaaacctctaatatgctgagaaaca

SEQ ID NO: 2570 - RNA, 89 nt, synthetic construct
  source 1..89: mol_type = other RNA
acagcttatttggaagctgaaatgtgaggtttataacactcacaagaatcctgaaaaaggatgccaaacccactgtggagcaacggagg

SEQ ID NO: 2571 - RNA, 89 nt, synthetic construct
  source 1..89: mol_type = other RNA
acagcttatttggaagctgaaatgtgaggtttataacactcacaagaatcctgaaaaaggatgccaaacacctccacctgtgatcccaa

SEQ ID NO: 2572 - RNA, 89 nt, synthetic construct
  source 1..89: mol_type = other RNA
acagcttatttggaagctgaaatgtgaggtttataacactcacaagaatcctgaaaaaggatgccaaacctttacagcctagagccagt

SEQ ID NO: 2573 - RNA, 89 nt, synthetic construct
  source 1..89: mol_type = other RNA
acagcttatttggaagctgaaatgtgaggtttataacactcacaagaatcctgaaaaaggatgccaaacctgagcagtccagaccagag

SEQ ID NO: 2574 - RNA, 89 nt, synthetic construct
  source 1..89: mol_type = other RNA
acagcttatttggaagctgaaatgtgaggtttataacactcacaagaatcctgaaaaaggatgccaaacaggcaggaaggccatgcagc

SEQ ID NO: 2575 - RNA, 89 nt, synthetic construct
  source 1..89: mol_type = other RNA
acagcttatttggaagctgaaatgtgaggtttataacactcacaagaatcctgaaaaaggatgccaaacttggctccaggatgggacag

SEQ ID NO: 2576 - RNA, 89 nt, synthetic construct
  source 1..89: mol_type = other RNA
acagcttatttggaagctgaaatgtgaggtttataacactcacaagaatcctgaaaaaggatgccaaacaaagccttccagtagaatgg

SEQ ID NO: 2577 - RNA, 89 nt, synthetic construct
  source 1..89: mol_type = other RNA
acagcttatttggaagctgaaatgtgaggtttataacactcacaagaatcctgaaaaaggatgccaaacatattagatagagaactaca

SEQ ID NO: 2578 - RNA, 89 nt, synthetic construct
  source 1..89: mol_type = other RNA
acagcttatttggaagctgaaatgtgaggtttataacactcacaagaatcctgaaaaaggatgccaaaccccagtgcaaggcttttggc

SEQ ID NO: 2579 - RNA, 89 nt, synthetic construct
  source 1..89: mol_type = other RNA
acagcttatttggaagctgaaatgtgaggtttataacactcacaagaatcctgaaaaaggatgccaaactagaaatactctgcagaacg

SEQ ID NO: 2580 - RNA, 89 nt, synthetic construct
  source 1..89: mol_type = other RNA
acagcttatttggaagctgaaatgtgaggtttataacactcacaagaatcctgaaaaaggatgccaaacaatcccaagcctttctccca

SEQ ID NO: 2581 - RNA, 89 nt, synthetic construct
  source 1..89: mol_type = other RNA
acagcttatttggaagctgaaatgtgaggtttataacactcacaagaatcctgaaaaaggatgccaaacgataccaaaggcttctaata

SEQ ID NO: 2582 - RNA, 89 nt, synthetic construct
  source 1..89: mol_type = other RNA
acagcttatttggaagctgaaatgtgaggtttataacactcacaagaatcctgaaaaaggatgccaaacaaactgagcaggcaagcggg

SEQ ID NO: 2583 - RNA, 89 nt, synthetic construct
  source 1..89: mol_type = other RNA
acagcttatttggaagctgaaatgtgaggtttataacactcacaagaatcctgaaaaaggatgccaaaccttttcacggccacctccgc

SEQ ID NO: 2584 - RNA, 89 nt, synthetic construct
  source 1..89: mol_type = other RNA
acagcttatttggaagctgaaatgtgaggtttataacactcacaagaatcctgaaaaaggatgccaaacagaaatccctctgagattgc

SEQ ID NO: 2585 - RNA, 89 nt, synthetic construct
  source 1..89: mol_type = other RNA
acagcttatttggaagctgaaatgtgaggtttataacactcacaagaatcctgaaaaaggatgccaaacgagtatagaaatactctgca

SEQ ID NO: 2586 - RNA, 89 nt, synthetic construct
  source 1..89: mol_type = other RNA
acagcttatttggaagctgaaatgtgaggtttataacactcacaagaatcctgaaaaaggatgccaaacaaggttacatgcccccacac

SEQ ID NO: 2587 - RNA, 89 nt, synthetic construct
  source 1..89: mol_type = other RNA
acagcttatttggaagctgaaatgtgaggtttataacactcacaagaatcctgaaaaaggatgccaaactttcttcccttccttcctct

SEQ ID NO: 2588 - RNA, 89 nt, synthetic construct
  source 1..89: mol_type = other RNA
acagcttatttggaagctgaaatgtgaggtttataacactcacaagaatcctgaaaaaggatgccaaacttttatattggctccaggat

SEQ ID NO: 2589 - RNA, 89 nt, synthetic construct
  source 1..89: mol_type = other RNA
acagcttatttggaagctgaaatgtgaggtttataacactcacaagaatcctgaaaaaggatgccaaacgagccagtgacaggctcctt

SEQ ID NO: 2590 - RNA, 89 nt, synthetic construct
  source 1..89: mol_type = other RNA
acagcttatttggaagctgaaatgtgaggtttataacactcacaagaatcctgaaaaaggatgccaaacgaaggtggagtatagaaata

SEQ ID NO: 2591 - RNA, 89 nt, synthetic construct
  source 1..89: mol_type = other RNA
acagcttatttggaagctgaaatgtgaggtttataacactcacaagaatcctgaaaaaggatgccaaacccactacccagtgcaaggct

SEQ ID NO: 2592 - RNA, 89 nt, synthetic construct
  source 1..89: mol_type = other RNA
acagcttatttggaagctgaaatgtgaggtttataacactcacaagaatcctgaaaaaggatgccaaacggtttcttttcctcgctagg

SEQ ID NO: 2593 - RNA, 89 nt, synthetic construct
  source 1..89: mol_type = other RNA
acagcttatttggaagctgaaatgtgaggtttataacactcacaagaatcctgaaaaaggatgccaaacaggtcggtgagacaggaaaa

SEQ ID NO: 2594 - RNA, 89 nt, synthetic construct
  source 1..89: mol_type = other RNA
acagcttatttggaagctgaaatgtgaggtttataacactcacaagaatcctgaaaaaggatgccaaacgagaactacagtagacccag

SEQ ID NO: 2595 - RNA, 89 nt, synthetic construct
  source 1..89: mol_type = other RNA
acagcttatttggaagctgaaatgtgaggtttataacactcacaagaatcctgaaaaaggatgccaaacagctgggcaaaggtcacctg

SEQ ID NO: 2596 - RNA, 89 nt, synthetic construct
  source 1..89: mol_type = other RNA
acagcttatttggaagctgaaatgtgaggtttataacactcacaagaatcctgaaaaaggatgccaaacttagatagagaactacagta

SEQ ID NO: 2597 - RNA, 89 nt, synthetic construct
  source 1..89: mol_type = other RNA
acagcttatttggaagctgaaatgtgaggtttataacactcacaagaatcctgaaaaaggatgccaaaccaggcagctctgccactacc

SEQ ID NO: 2598 - RNA, 89 nt, synthetic construct
  source 1..89: mol_type = other RNA
acagcttatttggaagctgaaatgtgaggtttataacactcacaagaatcctgaaaaaggatgccaaaccaaggcttttggcccatagc

SEQ ID NO: 2599 - RNA, 89 nt, synthetic construct
  source 1..89: mol_type = other RNA
acagcttatttggaagctgaaatgtgaggtttataacactcacaagaatcctgaaaaaggatgccaaacagagcttctccctccagctc

SEQ ID NO: 2600 - RNA, 89 nt, synthetic construct
  source 1..89: mol_type = other RNA
acagcttatttggaagctgaaatgtgaggtttataacactcacaagaatcctgaaaaaggatgccaaacggtaggcatggataccaaag

SEQ ID NO: 2601 - RNA, 89 nt, synthetic construct
  source 1..89: mol_type = other RNA
acagcttatttggaagctgaaatgtgaggtttataacactcacaagaatcctgaaaaaggatgccaaacagaaacaataggtttctttt

SEQ ID NO: 2602 - RNA, 89 nt, synthetic construct
  source 1..89: mol_type = other RNA
acagcttatttggaagctgaaatgtgaggtttataacactcacaagaatcctgaaaaaggatgccaaacgggtgggagggggcagagtg

SEQ ID NO: 2603 - RNA, 89 nt, synthetic construct
  source 1..89: mol_type = other RNA
acagcttatttggaagctgaaatgtgaggtttataacactcacaagaatcctgaaaaaggatgccaaactgctgagaaacaataggttt

SEQ ID NO: 2604 - RNA, 89 nt, synthetic construct
  source 1..89: mol_type = other RNA
acagcttatttggaagctgaaatgtgaggtttataacactcacaagaatcctgaaaaaggatgccaaacgctgggcagggattagtgag

SEQ ID NO: 2605 - RNA, 89 nt, synthetic construct
  source 1..89: mol_type = other RNA
acagcttatttggaagctgaaatgtgaggtttataacactcacaagaatcctgaaaaaggatgccaaacaacaagggacagcatgaccc

SEQ ID NO: 2606 - RNA, 89 nt, synthetic construct
  source 1..89: mol_type = other RNA
acagcttatttggaagctgaaatgtgaggtttataacactcacaagaatcctgaaaaaggatgccaaacgagcaacggaggaagtgggg

SEQ ID NO: 2607 - RNA, 89 nt, synthetic construct
  source 1..89: mol_type = other RNA
acagcttatttggaagctgaaatgtgaggtttataacactcacaagaatcctgaaaaaggatgccaaacccggctcacctagatgaggt

SEQ ID NO: 2608 - RNA, 89 nt, synthetic construct
  source 1..89: mol_type = other RNA
acagcttatttggaagctgaaatgtgaggtttataacactcacaagaatcctgaaaaaggatgccaaacggactcagttttttcagtcc

SEQ ID NO: 2609 - RNA, 89 nt, synthetic construct
  source 1..89: mol_type = other RNA
acagcttatttggaagctgaaatgtgaggtttataacactcacaagaatcctgaaaaaggatgccaaacgaaatactctgcagaacggg

SEQ ID NO: 2610 - RNA, 89 nt, synthetic construct
  source 1..89: mol_type = other RNA
acagcttatttggaagctgaaatgtgaggtttataacactcacaagaatcctgaaaaaggatgccaaacggctagatggctgggtggtg

SEQ ID NO: 2611 - RNA, 89 nt, synthetic construct
  source 1..89: mol_type = other RNA
acagcttatttggaagctgaaatgtgaggtttataacactcacaagaatcctgaaaaaggatgccaaacggagggggcagagtgaaggt

SEQ ID NO: 2612 - RNA, 89 nt, synthetic construct
  source 1..89: mol_type = other RNA
acagcttatttggaagctgaaatgtgaggtttataacactcacaagaatcctgaaaaaggatgccaaacgctgcttctagggataaaac

SEQ ID NO: 2613 - RNA, 89 nt, synthetic construct
  source 1..89: mol_type = other RNA
acagcttatttggaagctgaaatgtgaggtttataacactcacaagaatcctgaaaaaggatgccaaaccctggagtagctagctgctt

SEQ ID NO: 2614 - RNA, 89 nt, synthetic construct
  source 1..89: mol_type = other RNA
acagcttatttggaagctgaaatgtgaggtttataacactcacaagaatcctgaaaaaggatgccaaacccagaggagttgagaaatcc

SEQ ID NO: 2615 - RNA, 89 nt, synthetic construct
  source 1..89: mol_type = other RNA
acagcttatttggaagctgaaatgtgaggtttataacactcacaagaatcctgaaaaaggatgccaaaccagccatctgccagaggagt

SEQ ID NO: 2616 - RNA, 89 nt, synthetic construct
  source 1..89: mol_type = other RNA
acagcttatttggaagctgaaatgtgaggtttataacactcacaagaatcctgaaaaaggatgccaaaccccccacactgacctccacc

SEQ ID NO: 2617 - RNA, 89 nt, synthetic construct
  source 1..89: mol_type = other RNA
acagcttatttggaagctgaaatgtgaggtttataacactcacaagaatcctgaaaaaggatgccaaacgatagagaactacagtagac

SEQ ID NO: 2618 - RNA, 89 nt, synthetic construct
  source 1..89: mol_type = other RNA
acagcttatttggaagctgaaatgtgaggtttataacactcacaagaatcctgaaaaaggatgccaaaccatgcccccacactgacctc

SEQ ID NO: 2619 - RNA, 89 nt, synthetic construct
  source 1..89: mol_type = other RNA
acagcttatttggaagctgaaatgtgaggtttataacactcacaagaatcctgaaaaaggatgccaaactgatcccaacagtctcctct

SEQ ID NO: 2620 - RNA, 89 nt, synthetic construct
  source 1..89: mol_type = other RNA
acagcttatttggaagctgaaatgtgaggtttataacactcacaagaatcctgaaaaaggatgccaaacatcccaacagtctcctctgc

SEQ ID NO: 2621 - RNA, 89 nt, synthetic construct
  source 1..89: mol_type = other RNA
acagcttatttggaagctgaaatgtgaggtttataacactcacaagaatcctgaaaaaggatgccaaacgaatggggaatctgtggtgc

SEQ ID NO: 2622 - RNA, 89 nt, synthetic construct
  source 1..89: mol_type = other RNA
acagcttatttggaagctgaaatgtgaggtttataacactcacaagaatcctgaaaaaggatgccaaacgctgggtggtgagagcttct

SEQ ID NO: 2623 - RNA, 89 nt, synthetic construct
  source 1..89: mol_type = other RNA
acagcttatttggaagctgaaatgtgaggtttataacactcacaagaatcctgaaaaaggatgccaaacacccaattgcaggcagctct

SEQ ID NO: 2624 - RNA, 89 nt, synthetic construct
  source 1..89: mol_type = other RNA
acagcttatttggaagctgaaatgtgaggtttataacactcacaagaatcctgaaaaaggatgccaaacggacagcgggcacagaaggc

SEQ ID NO: 2625 - RNA, 89 nt, synthetic construct
  source 1..89: mol_type = other RNA
acagcttatttggaagctgaaatgtgaggtttataacactcacaagaatcctgaaaaaggatgccaaacgatgaggtcggtgagacagg

SEQ ID NO: 2626 - RNA, 89 nt, synthetic construct
  source 1..89: mol_type = other RNA
acagcttatttggaagctgaaatgtgaggtttataacactcacaagaatcctgaaaaaggatgccaaactggtgccactgtggagcaac

SEQ ID NO: 2627 - RNA, 89 nt, synthetic construct
  source 1..89: mol_type = other RNA
acagcttatttggaagctgaaatgtgaggtttataacactcacaagaatcctgaaaaaggatgccaaacggcatggataccaaaggctt

SEQ ID NO: 2628 - RNA, 89 nt, synthetic construct
  source 1..89: mol_type = other RNA
acagcttatttggaagctgaaatgtgaggtttataacactcacaagaatcctgaaaaaggatgccaaacagcaggcaagcggggagggc

SEQ ID NO: 2629 - RNA, 89 nt, synthetic construct
  source 1..89: mol_type = other RNA
acagcttatttggaagctgaaatgtgaggtttataacactcacaagaatcctgaaaaaggatgccaaacagtcccaagccttctgtggg

SEQ ID NO: 2630 - RNA, 89 nt, synthetic construct
  source 1..89: mol_type = other RNA
acagcttatttggaagctgaaatgtgaggtttataacactcacaagaatcctgaaaaaggatgccaaacatagctcagagcaagctaaa

SEQ ID NO: 2631 - RNA, 89 nt, synthetic construct
  source 1..89: mol_type = other RNA
acagcttatttggaagctgaaatgtgaggtttataacactcacaagaatcctgaaaaaggatgccaaacgggataaaactgagcaggca

SEQ ID NO: 2632 - RNA, 89 nt, synthetic construct
  source 1..89: mol_type = other RNA
acagcttatttggaagctgaaatgtgaggtttataacactcacaagaatcctgaaaaaggatgccaaacagcagtccagaccagagcct

SEQ ID NO: 2633 - RNA, 89 nt, synthetic construct
  source 1..89: mol_type = other RNA
acagcttatttggaagctgaaatgtgaggtttataacactcacaagaatcctgaaaaaggatgccaaactgggctagatggctgggtgg

SEQ ID NO: 2634 - RNA, 89 nt, synthetic construct
  source 1..89: mol_type = other RNA
acagcttatttggaagctgaaatgtgaggtttataacactcacaagaatcctgaaaaaggatgccaaacgctcagagcaagctaaacaa

SEQ ID NO: 2635 - RNA, 89 nt, synthetic construct
  source 1..89: mol_type = other RNA
acagcttatttggaagctgaaatgtgaggtttataacactcacaagaatcctgaaaaaggatgccaaaccttctagggataaaactgag

SEQ ID NO: 2636 - RNA, 89 nt, synthetic construct
  source 1..89: mol_type = other RNA
acagcttatttggaagctgaaatgtgaggtttataacactcacaagaatcctgaaaaaggatgccaaaccccatgcttttcacggccac

SEQ ID NO: 2637 - RNA, 89 nt, synthetic construct
  source 1..89: mol_type = other RNA
acagcttatttggaagctgaaatgtgaggtttataacactcacaagaatcctgaaaaaggatgccaaactattggctccaggatgggac

SEQ ID NO: 2638 - RNA, 89 nt, synthetic construct
  source 1..89: mol_type = other RNA
acagcttatttggaagctgaaatgtgaggtttataacactcacaagaatcctgaaaaaggatgccaaacggcaaaggtcacctgctgag

SEQ ID NO: 2639 - RNA, 89 nt, synthetic construct
  source 1..89: mol_type = other RNA
acagcttatttggaagctgaaatgtgaggtttataacactcacaagaatcctgaaaaaggatgccaaaccagcctagagccagtgacag

SEQ ID NO: 2640 - RNA, 89 nt, synthetic construct
  source 1..89: mol_type = other RNA
acagcttatttggaagctgaaatgtgaggtttataacactcacaagaatcctgaaaaaggatgccaaacaaaagcatgggcaatctcag

SEQ ID NO: 2641 - RNA, 89 nt, synthetic construct
  source 1..89: mol_type = other RNA
acagcttatttggaagctgaaatgtgaggtttataacactcacaagaatcctgaaaaaggatgccaaacctccaggtaatgcccctggg

SEQ ID NO: 2642 - RNA, 89 nt, synthetic construct
  source 1..89: mol_type = other RNA
acagcttatttggaagctgaaatgtgaggtttataacactcacaagaatcctgaaaaaggatgccaaacgctactccaggtaatgcccc

SEQ ID NO: 2643 - RNA, 89 nt, synthetic construct
  source 1..89: mol_type = other RNA
acagcttatttggaagctgaaatgtgaggtttataacactcacaagaatcctgaaaaaggatgccaaactcccctgtcttttcctgtct

SEQ ID NO: 2644 - RNA, 89 nt, synthetic construct
  source 1..89: mol_type = other RNA
acagcttatttggaagctgaaatgtgaggtttataacactcacaagaatcctgaaaaaggatgccaaactgcccgctgtcccatcctgg

SEQ ID NO: 2645 - RNA, 89 nt, synthetic construct
  source 1..89: mol_type = other RNA
acagcttatttggaagctgaaatgtgaggtttataacactcacaagaatcctgaaaaaggatgccaaacctcagttttatccctagaag

SEQ ID NO: 2646 - RNA, 89 nt, synthetic construct
  source 1..89: mol_type = other RNA
acagcttatttggaagctgaaatgtgaggtttataacactcacaagaatcctgaaaaaggatgccaaaccagagtatttctatactcca

SEQ ID NO: 2647 - RNA, 89 nt, synthetic construct
  source 1..89: mol_type = other RNA
acagcttatttggaagctgaaatgtgaggtttataacactcacaagaatcctgaaaaaggatgccaaacctgtcccttgtttagcttgc

SEQ ID NO: 2648 - RNA, 89 nt, synthetic construct
  source 1..89: mol_type = other RNA
acagcttatttggaagctgaaatgtgaggtttataacactcacaagaatcctgaaaaaggatgccaaacggtgagccggtagctgatcc

SEQ ID NO: 2649 - RNA, 89 nt, synthetic construct
  source 1..89: mol_type = other RNA
acagcttatttggaagctgaaatgtgaggtttataacactcacaagaatcctgaaaaaggatgccaaacctggaaggctttcaggtggc

SEQ ID NO: 2650 - RNA, 89 nt, synthetic construct
  source 1..89: mol_type = other RNA
acagcttatttggaagctgaaatgtgaggtttataacactcacaagaatcctgaaaaaggatgccaaacggccaaaagccttgcactgg

SEQ ID NO: 2651 - RNA, 89 nt, synthetic construct
  source 1..89: mol_type = other RNA
acagcttatttggaagctgaaatgtgaggtttataacactcacaagaatcctgaaaaaggatgccaaaccccctggggaggagaggaag

SEQ ID NO: 2652 - RNA, 89 nt, synthetic construct
  source 1..89: mol_type = other RNA
acagcttatttggaagctgaaatgtgaggtttataacactcacaagaatcctgaaaaaggatgccaaacctgtagttctctatctaata

SEQ ID NO: 2653 - RNA, 89 nt, synthetic construct
  source 1..89: mol_type = other RNA
acagcttatttggaagctgaaatgtgaggtttataacactcacaagaatcctgaaaaaggatgccaaacggtctactgtagttctctat

SEQ ID NO: 2654 - RNA, 89 nt, synthetic construct
  source 1..89: mol_type = other RNA
acagcttatttggaagctgaaatgtgaggtttataacactcacaagaatcctgaaaaaggatgccaaactctaatatcagtgggagaaa

SEQ ID NO: 2655 - RNA, 89 nt, synthetic construct
  source 1..89: mol_type = other RNA
acagcttatttggaagctgaaatgtgaggtttataacactcacaagaatcctgaaaaaggatgccaaacatcccttggtggcggaggtg

SEQ ID NO: 2656 - RNA, 89 nt, synthetic construct
  source 1..89: mol_type = other RNA
acagcttatttggaagctgaaatgtgaggtttataacactcacaagaatcctgaaaaaggatgccaaacgatgtcccgttctgcagagt

SEQ ID NO: 2657 - RNA, 89 nt, synthetic construct
  source 1..89: mol_type = other RNA
acagcttatttggaagctgaaatgtgaggtttataacactcacaagaatcctgaaaaaggatgccaaaccctgctcagttttatcccta

SEQ ID NO: 2658 - RNA, 89 nt, synthetic construct
  source 1..89: mol_type = other RNA
acagcttatttggaagctgaaatgtgaggtttataacactcacaagaatcctgaaaaaggatgccaaacaaacaggtcacagccctccc

SEQ ID NO: 2659 - RNA, 89 nt, synthetic construct
  source 1..89: mol_type = other RNA
acagcttatttggaagctgaaatgtgaggtttataacactcacaagaatcctgaaaaaggatgccaaactcactggctctaggctgtaa

SEQ ID NO: 2660 - RNA, 89 nt, synthetic construct
  source 1..89: mol_type = other RNA
acagcttatttggaagctgaaatgtgaggtttataacactcacaagaatcctgaaaaaggatgccaaacctctgagctattagaagcct

SEQ ID NO: 2661 - RNA, 89 nt, synthetic construct
  source 1..89: mol_type = other RNA
acagcttatttggaagctgaaatgtgaggtttataacactcacaagaatcctgaaaaaggatgccaaacatccctgcccagctacggca

SEQ ID NO: 2662 - RNA, 89 nt, synthetic construct
  source 1..89: mol_type = other RNA
acagcttatttggaagctgaaatgtgaggtttataacactcacaagaatcctgaaaaaggatgccaaacgcttctgtgaaggagcctgt

SEQ ID NO: 2663 - RNA, 89 nt, synthetic construct
  source 1..89: mol_type = other RNA
acagcttatttggaagctgaaatgtgaggtttataacactcacaagaatcctgaaaaaggatgccaaactagttctctatctaatatca

SEQ ID NO: 2664 - RNA, 89 nt, synthetic construct
  source 1..89: mol_type = other RNA
acagcttatttggaagctgaaatgtgaggtttataacactcacaagaatcctgaaaaaggatgccaaaccggcagaggagactgttggg

SEQ ID NO: 2665 - RNA, 89 nt, synthetic construct
  source 1..89: mol_type = other RNA
acagcttatttggaagctgaaatgtgaggtttataacactcacaagaatcctgaaaaaggatgccaaacaaggagcctgtcactggctc

SEQ ID NO: 2666 - RNA, 89 nt, synthetic construct
  source 1..89: mol_type = other RNA
acagcttatttggaagctgaaatgtgaggtttataacactcacaagaatcctgaaaaaggatgccaaacgcccacagaaggcttgggac

SEQ ID NO: 2667 - RNA, 89 nt, synthetic construct
  source 1..89: mol_type = other RNA
acagcttatttggaagctgaaatgtgaggtttataacactcacaagaatcctgaaaaaggatgccaaactccctagaagcagctagcta

SEQ ID NO: 2668 - RNA, 89 nt, synthetic construct
  source 1..89: mol_type = other RNA
acagcttatttggaagctgaaatgtgaggtttataacactcacaagaatcctgaaaaaggatgccaaaccctacccaggactgaaaaaa

SEQ ID NO: 2669 - RNA, 89 nt, synthetic construct
  source 1..89: mol_type = other RNA
acagcttatttggaagctgaaatgtgaggtttataacactcacaagaatcctgaaaaaggatgccaaacttgtttctcagcatattaga

SEQ ID NO: 2670 - RNA, 89 nt, synthetic construct
  source 1..89: mol_type = other RNA
acagcttatttggaagctgaaatgtgaggtttataacactcacaagaatcctgaaaaaggatgccaaacttgggatcacaggtggaggt

SEQ ID NO: 2671 - RNA, 89 nt, synthetic construct
  source 1..89: mol_type = other RNA
acagcttatttggaagctgaaatgtgaggtttataacactcacaagaatcctgaaaaaggatgccaaacgcagatggctgcatggcctt

SEQ ID NO: 2672 - RNA, 89 nt, synthetic construct
  source 1..89: mol_type = other RNA
acagcttatttggaagctgaaatgtgaggtttataacactcacaagaatcctgaaaaaggatgccaaaccctcaggctctggtctggac

SEQ ID NO: 2673 - RNA, 89 nt, synthetic construct
  source 1..89: mol_type = other RNA
acagcttatttggaagctgaaatgtgaggtttataacactcacaagaatcctgaaaaaggatgccaaacacctttgcccagctcactgg

SEQ ID NO: 2674 - RNA, 89 nt, synthetic construct
  source 1..89: mol_type = other RNA
acagcttatttggaagctgaaatgtgaggtttataacactcacaagaatcctgaaaaaggatgccaaacgtatccatgcctacccagga

SEQ ID NO: 2675 - RNA, 89 nt, synthetic construct
  source 1..89: mol_type = other RNA
acagcttatttggaagctgaaatgtgaggtttataacactcacaagaatcctgaaaaaggatgccaaacgaagcctttggtatccatgc

SEQ ID NO: 2676 - RNA, 89 nt, synthetic construct
  source 1..89: mol_type = other RNA
acagcttatttggaagctgaaatgtgaggtttataacactcacaagaatcctgaaaaaggatgccaaacggggcatgtaaccttcactc

SEQ ID NO: 2677 - RNA, 89 nt, synthetic construct
  source 1..89: mol_type = other RNA
acagcttatttggaagctgaaatgtgaggtttataacactcacaagaatcctgaaaaaggatgccaaacgggaaagggaggctatgggc

SEQ ID NO: 2678 - RNA, 89 nt, synthetic construct
  source 1..89: mol_type = other RNA
acagcttatttggaagctgaaatgtgaggtttataacactcacaagaatcctgaaaaaggatgccaaactgaaggagcctgtcactggc

SEQ ID NO: 2679 - RNA, 89 nt, synthetic construct
  source 1..89: mol_type = other RNA
acagcttatttggaagctgaaatgtgaggtttataacactcacaagaatcctgaaaaaggatgccaaacgggggggctagaagctgggg

SEQ ID NO: 2680 - RNA, 89 nt, synthetic construct
  source 1..89: mol_type = other RNA
acagcttatttggaagctgaaatgtgaggtttataacactcacaagaatcctgaaaaaggatgccaaacggtagtggcagagctgcctg

SEQ ID NO: 2681 - RNA, 89 nt, synthetic construct
  source 1..89: mol_type = other RNA
acagcttatttggaagctgaaatgtgaggtttataacactcacaagaatcctgaaaaaggatgccaaactcccatcctggagccaatat

SEQ ID NO: 2682 - RNA, 89 nt, synthetic construct
  source 1..89: mol_type = other RNA
acagcttatttggaagctgaaatgtgaggtttataacactcacaagaatcctgaaaaaggatgccaaacgaagctggggaaagggaggc

SEQ ID NO: 2683 - RNA, 89 nt, synthetic construct
  source 1..89: mol_type = other RNA
acagcttatttggaagctgaaatgtgaggtttataacactcacaagaatcctgaaaaaggatgccaaacgctgatcccttggtggcgga

SEQ ID NO: 2684 - RNA, 89 nt, synthetic construct
  source 1..89: mol_type = other RNA
acagcttatttggaagctgaaatgtgaggtttataacactcacaagaatcctgaaaaaggatgccaaacgcgaggaaaagaaacctatt

SEQ ID NO: 2685 - RNA, 89 nt, synthetic construct
  source 1..89: mol_type = other RNA
acagcttatttggaagctgaaatgtgaggtttataacactcacaagaatcctgaaaaaggatgccaaacgactgctcagcaggtgacct

SEQ ID NO: 2686 - RNA, 89 nt, synthetic construct
  source 1..89: mol_type = other RNA
acagcttatttggaagctgaaatgtgaggtttataacactcacaagaatcctgaaaaaggatgccaaacgaaggctttcaggtggcttc

SEQ ID NO: 2687 - RNA, 89 nt, synthetic construct
  source 1..89: mol_type = other RNA
acagcttatttggaagctgaaatgtgaggtttataacactcacaagaatcctgaaaaaggatgccaaacaggtccaaggcttgtcccct

SEQ ID NO: 2688 - RNA, 89 nt, synthetic construct
  source 1..89: mol_type = other RNA
acagcttatttggaagctgaaatgtgaggtttataacactcacaagaatcctgaaaaaggatgccaaactggggggggctagaagctgg

SEQ ID NO: 2689 - RNA, 89 nt, synthetic construct
  source 1..89: mol_type = other RNA
acagcttatttggaagctgaaatgtgaggtttataacactcacaagaatcctgaaaaaggatgccaaactttctcagcatattagagta

SEQ ID NO: 2690 - RNA, 89 nt, synthetic construct
  source 1..89: mol_type = other RNA
acagcttatttggaagctgaaatgtgaggtttataacactcacaagaatcctgaaaaaggatgccaaacggcaatctcagagggatttc

SEQ ID NO: 2691 - RNA, 89 nt, synthetic construct
  source 1..89: mol_type = other RNA
acagcttatttggaagctgaaatgtgaggtttataacactcacaagaatcctgaaaaaggatgccaaacaagcaggcctgaggtccaag

SEQ ID NO: 2692 - RNA, 89 nt, synthetic construct
  source 1..89: mol_type = other RNA
acagcttatttggaagctgaaatgtgaggtttataacactcacaagaatcctgaaaaaggatgccaaactctcaccgacctcatctagg

SEQ ID NO: 2693 - RNA, 89 nt, synthetic construct
  source 1..89: mol_type = other RNA
acagcttatttggaagctgaaatgtgaggtttataacactcacaagaatcctgaaaaaggatgccaaactcccgttctgcagagtattt

SEQ ID NO: 2694 - RNA, 89 nt, synthetic construct
  source 1..89: mol_type = other RNA
acagcttatttggaagctgaaatgtgaggtttataacactcacaagaatcctgaaaaaggatgccaaactcagtgggagaaaggcttgg

SEQ ID NO: 2695 - RNA, 89 nt, synthetic construct
  source 1..89: mol_type = other RNA
acagcttatttggaagctgaaatgtgaggtttataacactcacaagaatcctgaaaaaggatgccaaacgaagcagctagctactccag

SEQ ID NO: 2696 - RNA, 89 nt, synthetic construct
  source 1..89: mol_type = other RNA
acagcttatttggaagctgaaatgtgaggtttataacactcacaagaatcctgaaaaaggatgccaaacatatcagtgggagaaaggct

SEQ ID NO: 2697 - RNA, 89 nt, synthetic construct
  source 1..89: mol_type = other RNA
acagcttatttggaagctgaaatgtgaggtttataacactcacaagaatcctgaaaaaggatgccaaacatgcccctggggaggagagg

SEQ ID NO: 2698 - RNA, 89 nt, synthetic construct
  source 1..89: mol_type = other RNA
acagcttatttggaagctgaaatgtgaggtttataacactcacaagaatcctgaaaaaggatgccaaactcccttgtttagcttgctct

SEQ ID NO: 2699 - RNA, 89 nt, synthetic construct
  source 1..89: mol_type = other RNA
acagcttatttggaagctgaaatgtgaggtttataacactcacaagaatcctgaaaaaggatgccaaaccccgctgtcccatcctggag

SEQ ID NO: 2700 - RNA, 89 nt, synthetic construct
  source 1..89: mol_type = other RNA
acagcttatttggaagctgaaatgtgaggtttataacactcacaagaatcctgaaaaaggatgccaaacgagccaatataaaacaggtc

SEQ ID NO: 2701 - RNA, 89 nt, synthetic construct
  source 1..89: mol_type = other RNA
acagcttatttggaagctgaaatgtgaggtttataacactcacaagaatcctgaaaaaggatgccaaacgccttcctgcctcaggctct

SEQ ID NO: 2702 - RNA, 89 nt, synthetic construct
  source 1..89: mol_type = other RNA
acagcttatttggaagctgaaatgtgaggtttataacactcacaagaatcctgaaaaaggatgccaaacggctgtaaagcaggcctgag

SEQ ID NO: 2703 - RNA, 89 nt, synthetic construct
  source 1..89: mol_type = other RNA
acagcttatttggaagctgaaatgtgaggtttataacactcacaagaatcctgaaaaaggatgccaaactaaagcaggcctgaggtcca

SEQ ID NO: 2704 - RNA, 89 nt, synthetic construct
  source 1..89: mol_type = other RNA
acagcttatttggaagctgaaatgtgaggtttataacactcacaagaatcctgaaaaaggatgccaaacgcggaggtggccgtgaaaag

SEQ ID NO: 2705 - RNA, 89 nt, synthetic construct
  source 1..89: mol_type = other RNA
acagcttatttggaagctgaaatgtgaggtttataacactcacaagaatcctgaaaaaggatgccaaacagccggtagctgatcccttg

SEQ ID NO: 2706 - RNA, 89 nt, synthetic construct
  source 1..89: mol_type = other RNA
acagcttatttggaagctgaaatgtgaggtttataacactcacaagaatcctgaaaaaggatgccaaacgtggcggaggtggccgtgaa

SEQ ID NO: 2707 - RNA, 89 nt, synthetic construct
  source 1..89: mol_type = other RNA
acagcttatttggaagctgaaatgtgaggtttataacactcacaagaatcctgaaaaaggatgccaaactactccaccttccaccccac

SEQ ID NO: 2708 - RNA, 89 nt, synthetic construct
  source 1..89: mol_type = other RNA
acagcttatttggaagctgaaatgtgaggtttataacactcacaagaatcctgaaaaaggatgccaaacgttctctatctaatatcagt

SEQ ID NO: 2709 - RNA, 89 nt, synthetic construct
  source 1..89: mol_type = other RNA
acagcttatttggaagctgaaatgtgaggtttataacactcacaagaatcctgaaaaaggatgccaaaccccagctcactgggccttct

SEQ ID NO: 2710 - RNA, 89 nt, synthetic construct
  source 1..89: mol_type = other RNA
acagcttatttggaagctgaaatgtgaggtttataacactcacaagaatcctgaaaaaggatgccaaactgggccaaaagccttgcact

SEQ ID NO: 2711 - RNA, 89 nt, synthetic construct
  source 1..89: mol_type = other RNA
acagcttatttggaagctgaaatgtgaggtttataacactcacaagaatcctgaaaaaggatgccaaacctccaccttccaccccactt

SEQ ID NO: 2712 - RNA, 89 nt, synthetic construct
  source 1..89: mol_type = other RNA
acagcttatttggaagctgaaatgtgaggtttataacactcacaagaatcctgaaaaaggatgccaaacgaggtcagtgtgggggcatg

SEQ ID NO: 2713 - RNA, 89 nt, synthetic construct
  source 1..89: mol_type = other RNA
acagcttatttggaagctgaaatgtgaggtttataacactcacaagaatcctgaaaaaggatgccaaaccactgggtagtggcagagct

SEQ ID NO: 2714 - RNA, 89 nt, synthetic construct
  source 1..89: mol_type = other RNA
acagcttatttggaagctgaaatgtgaggtttataacactcacaagaatcctgaaaaaggatgccaaaccccaggactgaaaaaactga

SEQ ID NO: 2715 - RNA, 89 nt, synthetic construct
  source 1..89: mol_type = other RNA
acagcttatttggaagctgaaatgtgaggtttataacactcacaagaatcctgaaaaaggatgccaaaccctgcaattgggtcatgctg

SEQ ID NO: 2716 - RNA, 89 nt, synthetic construct
  source 1..89: mol_type = other RNA
acagcttatttggaagctgaaatgtgaggtttataacactcacaagaatcctgaaaaaggatgccaaacccccctcccaccccacttcc

SEQ ID NO: 2717 - RNA, 89 nt, synthetic construct
  source 1..89: mol_type = other RNA
acagcttatttggaagctgaaatgtgaggtttataacactcacaagaatcctgaaaaaggatgccaaacggagaaaggcttgggattca

SEQ ID NO: 2718 - RNA, 89 nt, synthetic construct
  source 1..89: mol_type = other RNA
acagcttatttggaagctgaaatgtgaggtttataacactcacaagaatcctgaaaaaggatgccaaactaaccttcactctgccccct

SEQ ID NO: 2719 - RNA, 89 nt, synthetic construct
  source 1..89: mol_type = other RNA
acagcttatttggaagctgaaatgtgaggtttataacactcacaagaatcctgaaaaaggatgccaaaccatggccttcctgcctcagg

SEQ ID NO: 2720 - RNA, 89 nt, synthetic construct
  source 1..89: mol_type = other RNA
acagcttatttggaagctgaaatgtgaggtttataacactcacaagaatcctgaaaaaggatgccaaactccatgcctacccaggactg

SEQ ID NO: 2721 - RNA, 89 nt, synthetic construct
  source 1..89: mol_type = other RNA
acagcttatttggaagctgaaatgtgaggtttataacactcacaagaatcctgaaaaaggatgccaaacctccacagtggcaccacaga

SEQ ID NO: 2722 - RNA, 89 nt, synthetic construct
  source 1..89: mol_type = other RNA
acagcttatttggaagctgaaatgtgaggtttataacactcacaagaatcctgaaaaaggatgccaaacggccttctgtgcccgctgtc

SEQ ID NO: 2723 - RNA, 89 nt, synthetic construct
  source 1..89: mol_type = other RNA
acagcttatttggaagctgaaatgtgaggtttataacactcacaagaatcctgaaaaaggatgccaaacgtctggactgctcagcaggt

SEQ ID NO: 2724 - RNA, 89 nt, synthetic construct
  source 1..89: mol_type = other RNA
acagcttatttggaagctgaaatgtgaggtttataacactcacaagaatcctgaaaaaggatgccaaacctcagcaggtgacctttgcc

SEQ ID NO: 2725 - RNA, 89 nt, synthetic construct
  source 1..89: mol_type = other RNA
acagcttatttggaagctgaaatgtgaggtttataacactcacaagaatcctgaaaaaggatgccaaacgcttgctctgagctattaga

SEQ ID NO: 2726 - RNA, 89 nt, synthetic construct
  source 1..89: mol_type = other RNA
acagcttatttggaagctgaaatgtgaggtttataacactcacaagaatcctgaaaaaggatgccaaactccttctctcactaatccct

SEQ ID NO: 2727 - RNA, 89 nt, synthetic construct
  source 1..89: mol_type = other RNA
acagcttatttggaagctgaaatgtgaggtttataacactcacaagaatcctgaaaaaggatgccaaacttagagtagatgtcccgttc

SEQ ID NO: 2728 - RNA, 89 nt, synthetic construct
  source 1..89: mol_type = other RNA
acagcttatttggaagctgaaatgtgaggtttataacactcacaagaatcctgaaaaaggatgccaaactaaaacaggtcacagccctc

SEQ ID NO: 2729 - RNA, 89 nt, synthetic construct
  source 1..89: mol_type = other RNA
acagcttatttggaagctgaaatgtgaggtttataacactcacaagaatcctgaaaaaggatgccaaacagtcctagcgaggaaaagaa

SEQ ID NO: 2730 - RNA, 89 nt, synthetic construct
  source 1..89: mol_type = other RNA
acagcttatttggaagctgaaatgtgaggtttataacactcacaagaatcctgaaaaaggatgccaaacgagggagaagctctcaccac

SEQ ID NO: 2731 - RNA, 89 nt, synthetic construct
  source 1..89: mol_type = other RNA
acagcttatttggaagctgaaatgtgaggtttataacactcacaagaatcctgaaaaaggatgccaaacgtctccacccttgggttcct

SEQ ID NO: 2732 - RNA, 89 nt, synthetic construct
  source 1..89: mol_type = other RNA
acagcttatttggaagctgaaatgtgaggtttataacactcacaagaatcctgaaaaaggatgccaaaccccagctacggcagaggaga

SEQ ID NO: 2733 - RNA, 89 nt, synthetic construct
  source 1..89: mol_type = other RNA
acagcttatttggaagctgaaatgtgaggtttataacactcacaagaatcctgaaaaaggatgccaaactttagcttgctctgagctat

SEQ ID NO: 2734 - RNA, 89 nt, synthetic construct
  source 1..89: mol_type = other RNA
acagcttatttggaagctgaaatgtgaggtttataacactcacaagaatcctgaaaaaggatgccaaacggactcatggtctccaccct

SEQ ID NO: 2735 - RNA, 89 nt, synthetic construct
  source 1..89: mol_type = other RNA
acagcttatttggaagctgaaatgtgaggtttataacactcacaagaatcctgaaaaaggatgccaaacggtcatgctgtcccttgttt

SEQ ID NO: 2736 - RNA, 89 nt, synthetic construct
  source 1..89: mol_type = other RNA
acagcttatttggaagctgaaatgtgaggtttataacactcacaagaatcctgaaaaaggatgccaaacgccgtgaaaagcatgggcaa

SEQ ID NO: 2737 - RNA, 89 nt, synthetic construct
  source 1..89: mol_type = other RNA
acagcttatttggaagctgaaatgtgaggtttataacactcacaagaatcctgaaaaaggatgccaaacttagaagcctttggtatcca

SEQ ID NO: 2738 - RNA, 89 nt, synthetic construct
  source 1..89: mol_type = other RNA
acagcttatttggaagctgaaatgtgaggtttataacactcacaagaatcctgaaaaaggatgccaaacggatcacaggtggaggtcag

SEQ ID NO: 2739 - RNA, 89 nt, synthetic construct
  source 1..89: mol_type = other RNA
acagcttatttggaagctgaaatgtgaggtttataacactcacaagaatcctgaaaaaggatgccaaaccaattgggtcatgctgtccc

SEQ ID NO: 2740 - RNA, 89 nt, synthetic construct
  source 1..89: mol_type = other RNA
acagcttatttggaagctgaaatgtgaggtttataacactcacaagaatcctgaaaaaggatgccaaacgctctaggctgtaaagcagg

SEQ ID NO: 2741 - RNA, 89 nt, synthetic construct
  source 1..89: mol_type = other RNA
acagcttatttggaagctgaaatgtgaggtttataacactcacaagaatcctgaaaaaggatgccaaacggttcctggtgtgggggggg

SEQ ID NO: 2742 - RNA, 89 nt, synthetic construct
  source 1..89: mol_type = other RNA
acagcttatttggaagctgaaatgtgaggtttataacactcacaagaatcctgaaaaaggatgccaaacgtggcagagctgcctgcaat

SEQ ID NO: 2743 - RNA, 89 nt, synthetic construct
  source 1..89: mol_type = other RNA
acagcttatttggaagctgaaatgtgaggtttataacactcacaagaatcctgaaaaaggatgccaaacgcaccacagattccccattc

SEQ ID NO: 2744 - RNA, 89 nt, synthetic construct
  source 1..89: mol_type = other RNA
acagcttatttggaagctgaaatgtgaggtttataacactcacaagaatcctgaaaaaggatgccaaactttctatactccaccttcca

SEQ ID NO: 2745 - RNA, 89 nt, synthetic construct
  source 1..89: mol_type = other RNA
acagcttatttggaagctgaaatgtgaggtttataacactcacaagaatcctgaaaaaggatgccaaacgtgtggggggggctagaagc

SEQ ID NO: 2746 - RNA, 89 nt, synthetic construct
  source 1..89: mol_type = other RNA
acagcttatttggaagctgaaatgtgaggtttataacactcacaagaatcctgaaaaaggatgccaaacaccttcactctgccccctcc

SEQ ID NO: 2747 - RNA, 89 nt, synthetic construct
  source 1..89: mol_type = other RNA
acagcttatttggaagctgaaatgtgaggtttataacactcacaagaatcctgaaaaaggatgccaaacgctgcatggccttcctgcct

SEQ ID NO: 2748 - RNA, 89 nt, synthetic construct
  source 1..89: mol_type = other RNA
acagcttatttggaagctgaaatgtgaggtttataacactcacaagaatcctgaaaaaggatgccaaactgggggcatgtaaccttcac

SEQ ID NO: 2749 - RNA, 89 nt, synthetic construct
  source 1..89: mol_type = other RNA
acagcttatttggaagctgaaatgtgaggtttataacactcacaagaatcctgaaaaaggatgccaaacgggggctgggtctactgtag

SEQ ID NO: 2750 - RNA, 89 nt, synthetic construct
  source 1..89: mol_type = other RNA
acagcttatttggaagctgaaatgtgaggtttataacactcacaagaatcctgaaaaaggatgccaaacgcagagctgcctgcaattgg

SEQ ID NO: 2751 - RNA, 89 nt, synthetic construct
  source 1..89: mol_type = other RNA
acagcttatttggaagctgaaatgtgaggtttataacactcacaagaatcctgaaaaaggatgccaaacaaaaaactgagtcctagcga

SEQ ID NO: 2752 - RNA, 89 nt, synthetic construct
  source 1..89: mol_type = other RNA
acagcttatttggaagctgaaatgtgaggtttataacactcacaagaatcctgaaaaaggatgccaaacagctattagaagcctttggt

SEQ ID NO: 2753 - RNA, 89 nt, synthetic construct
  source 1..89: mol_type = other RNA
acagcttatttggaagctgaaatgtgaggtttataacactcacaagaatcctgaaaaaggatgccaaacgggaggagaggaaggaaggg

SEQ ID NO: 2754 - RNA, 89 nt, synthetic construct
  source 1..89: mol_type = other RNA
acagcttatttggaagctgaaatgtgaggtttataacactcacaagaatcctgaaaaaggatgccaaactcttttcctgtctcaccgac

SEQ ID NO: 2755 - RNA, 89 nt, synthetic construct
  source 1..89: mol_type = other RNA
acagcttatttggaagctgaaatgtgaggtttataacactcacaagaatcctgaaaaaggatgccaaacgagtagatgtcccgttctgc

SEQ ID NO: 2756 - RNA, 89 nt, synthetic construct
  source 1..89: mol_type = other RNA
acagcttatttggaagctgaaatgtgaggtttataacactcacaagaatcctgaaaaaggatgccaaacctccttgggctcacctgcac

SEQ ID NO: 2757 - RNA, 89 nt, synthetic construct
  source 1..89: mol_type = other RNA
acagcttatttggaagctgaaatgtgaggtttataacactcacaagaatcctgaaaaaggatgccaaacacgctcagagtgaggacaaa

SEQ ID NO: 2758 - RNA, 89 nt, synthetic construct
  source 1..89: mol_type = other RNA
acagcttatttggaagctgaaatgtgaggtttataacactcacaagaatcctgaaaaaggatgccaaacatccccactccaatcctcct

SEQ ID NO: 2759 - RNA, 89 nt, synthetic construct
  source 1..89: mol_type = other RNA
acagcttatttggaagctgaaatgtgaggtttataacactcacaagaatcctgaaaaaggatgccaaacctgagccccacctctttagc

SEQ ID NO: 2760 - RNA, 89 nt, synthetic construct
  source 1..89: mol_type = other RNA
acagcttatttggaagctgaaatgtgaggtttataacactcacaagaatcctgaaaaaggatgccaaacaggacaaaaccccaaatcct

SEQ ID NO: 2761 - RNA, 89 nt, synthetic construct
  source 1..89: mol_type = other RNA
acagcttatttggaagctgaaatgtgaggtttataacactcacaagaatcctgaaaaaggatgccaaaccattcccccctcttaatccc

SEQ ID NO: 2762 - RNA, 89 nt, synthetic construct
  source 1..89: mol_type = other RNA
acagcttatttggaagctgaaatgtgaggtttataacactcacaagaatcctgaaaaaggatgccaaacgggagccaaggactggctca

SEQ ID NO: 2763 - RNA, 89 nt, synthetic construct
  source 1..89: mol_type = other RNA
acagcttatttggaagctgaaatgtgaggtttataacactcacaagaatcctgaaaaaggatgccaaacgccacatgtgcggcctcatc

SEQ ID NO: 2764 - RNA, 89 nt, synthetic construct
  source 1..89: mol_type = other RNA
acagcttatttggaagctgaaatgtgaggtttataacactcacaagaatcctgaaaaaggatgccaaacattaaacattaacgggcccc

SEQ ID NO: 2765 - RNA, 89 nt, synthetic construct
  source 1..89: mol_type = other RNA
acagcttatttggaagctgaaatgtgaggtttataacactcacaagaatcctgaaaaaggatgccaaacggggccgggagatcacgcca

SEQ ID NO: 2766 - RNA, 89 nt, synthetic construct
  source 1..89: mol_type = other RNA
acagcttatttggaagctgaaatgtgaggtttataacactcacaagaatcctgaaaaaggatgccaaactacttctccctccaacaata

SEQ ID NO: 2767 - RNA, 89 nt, synthetic construct
  source 1..89: mol_type = other RNA
acagcttatttggaagctgaaatgtgaggtttataacactcacaagaatcctgaaaaaggatgccaaacatctccatcctcgtcctggg

SEQ ID NO: 2768 - RNA, 89 nt, synthetic construct
  source 1..89: mol_type = other RNA
acagcttatttggaagctgaaatgtgaggtttataacactcacaagaatcctgaaaaaggatgccaaacattgggctgcaaacgggacc

SEQ ID NO: 2769 - RNA, 89 nt, synthetic construct
  source 1..89: mol_type = other RNA
acagcttatttggaagctgaaatgtgaggtttataacactcacaagaatcctgaaaaaggatgccaaacatgtctctggggagccaagg

SEQ ID NO: 2770 - RNA, 89 nt, synthetic construct
  source 1..89: mol_type = other RNA
acagcttatttggaagctgaaatgtgaggtttataacactcacaagaatcctgaaaaaggatgccaaacttacattcccccctcttaat

SEQ ID NO: 2771 - RNA, 89 nt, synthetic construct
  source 1..89: mol_type = other RNA
acagcttatttggaagctgaaatgtgaggtttataacactcacaagaatcctgaaaaaggatgccaaaccttctccctccaacaatatt

SEQ ID NO: 2772 - RNA, 89 nt, synthetic construct
  source 1..89: mol_type = other RNA
acagcttatttggaagctgaaatgtgaggtttataacactcacaagaatcctgaaaaaggatgccaaacacccatgactcttcactgcg

SEQ ID NO: 2773 - RNA, 89 nt, synthetic construct
  source 1..89: mol_type = other RNA
acagcttatttggaagctgaaatgtgaggtttataacactcacaagaatcctgaaaaaggatgccaaacctaaaggatcaggtttcggc

SEQ ID NO: 2774 - RNA, 89 nt, synthetic construct
  source 1..89: mol_type = other RNA
acagcttatttggaagctgaaatgtgaggtttataacactcacaagaatcctgaaaaaggatgccaaaccctggcacccataccttgga

SEQ ID NO: 2775 - RNA, 89 nt, synthetic construct
  source 1..89: mol_type = other RNA
acagcttatttggaagctgaaatgtgaggtttataacactcacaagaatcctgaaaaaggatgccaaacgcggtggccacatgtgcggc

SEQ ID NO: 2776 - RNA, 89 nt, synthetic construct
  source 1..89: mol_type = other RNA
acagcttatttggaagctgaaatgtgaggtttataacactcacaagaatcctgaaaaaggatgccaaacgaagccttctggggtgtggg

SEQ ID NO: 2777 - RNA, 89 nt, synthetic construct
  source 1..89: mol_type = other RNA
acagcttatttggaagctgaaatgtgaggtttataacactcacaagaatcctgaaaaaggatgccaaacgacgcctgggggccgggaga

SEQ ID NO: 2778 - RNA, 89 nt, synthetic construct
  source 1..89: mol_type = other RNA
acagcttatttggaagctgaaatgtgaggtttataacactcacaagaatcctgaaaaaggatgccaaactatcccttccctccctggcc

SEQ ID NO: 2779 - RNA, 89 nt, synthetic construct
  source 1..89: mol_type = other RNA
acagcttatttggaagctgaaatgtgaggtttataacactcacaagaatcctgaaaaaggatgccaaacacgggccccggtactaaagg

SEQ ID NO: 2780 - RNA, 89 nt, synthetic construct
  source 1..89: mol_type = other RNA
acagcttatttggaagctgaaatgtgaggtttataacactcacaagaatcctgaaaaaggatgccaaacaactttgcactccatccagc

SEQ ID NO: 2781 - RNA, 89 nt, synthetic construct
  source 1..89: mol_type = other RNA
acagcttatttggaagctgaaatgtgaggtttataacactcacaagaatcctgaaaaaggatgccaaacgatgagcagagaagaccccc

SEQ ID NO: 2782 - RNA, 89 nt, synthetic construct
  source 1..89: mol_type = other RNA
acagcttatttggaagctgaaatgtgaggtttataacactcacaagaatcctgaaaaaggatgccaaacgagaccaccagacggctaga

SEQ ID NO: 2783 - RNA, 89 nt, synthetic construct
  source 1..89: mol_type = other RNA
acagcttatttggaagctgaaatgtgaggtttataacactcacaagaatcctgaaaaaggatgccaaacgcacccataccttggagcaa

SEQ ID NO: 2784 - RNA, 89 nt, synthetic construct
  source 1..89: mol_type = other RNA
acagcttatttggaagctgaaatgtgaggtttataacactcacaagaatcctgaaaaaggatgccaaacgcatttccggggtctcccag

SEQ ID NO: 2785 - RNA, 89 nt, synthetic construct
  source 1..89: mol_type = other RNA
acagcttatttggaagctgaaatgtgaggtttataacactcacaagaatcctgaaaaaggatgccaaaccccatcggggcgaggagagg

SEQ ID NO: 2786 - RNA, 89 nt, synthetic construct
  source 1..89: mol_type = other RNA
acagcttatttggaagctgaaatgtgaggtttataacactcacaagaatcctgaaaaaggatgccaaacaacattaacgggccccggta

SEQ ID NO: 2787 - RNA, 89 nt, synthetic construct
  source 1..89: mol_type = other RNA
acagcttatttggaagctgaaatgtgaggtttataacactcacaagaatcctgaaaaaggatgccaaacctggacgcctgggggccggg

SEQ ID NO: 2788 - RNA, 89 nt, synthetic construct
  source 1..89: mol_type = other RNA
acagcttatttggaagctgaaatgtgaggtttataacactcacaagaatcctgaaaaaggatgccaaacgacgcctgggactcggggca

SEQ ID NO: 2789 - RNA, 89 nt, synthetic construct
  source 1..89: mol_type = other RNA
acagcttatttggaagctgaaatgtgaggtttataacactcacaagaatcctgaaaaaggatgccaaactcccttccctccctggcctc

SEQ ID NO: 2790 - RNA, 89 nt, synthetic construct
  source 1..89: mol_type = other RNA
acagcttatttggaagctgaaatgtgaggtttataacactcacaagaatcctgaaaaaggatgccaaaccgggccgtgatgtctctggg

SEQ ID NO: 2791 - RNA, 89 nt, synthetic construct
  source 1..89: mol_type = other RNA
acagcttatttggaagctgaaatgtgaggtttataacactcacaagaatcctgaaaaaggatgccaaacccttggagcaacggcggaag

SEQ ID NO: 2792 - RNA, 89 nt, synthetic construct
  source 1..89: mol_type = other RNA
acagcttatttggaagctgaaatgtgaggtttataacactcacaagaatcctgaaaaaggatgccaaacactcttcactgcgtggagtg

SEQ ID NO: 2793 - RNA, 89 nt, synthetic construct
  source 1..89: mol_type = other RNA
acagcttatttggaagctgaaatgtgaggtttataacactcacaagaatcctgaaaaaggatgccaaacgcagcaacagcagcagcagc

SEQ ID NO: 2794 - RNA, 89 nt, synthetic construct
  source 1..89: mol_type = other RNA
acagcttatttggaagctgaaatgtgaggtttataacactcacaagaatcctgaaaaaggatgccaaacccgacttcccgacttcccgc

SEQ ID NO: 2795 - RNA, 89 nt, synthetic construct
  source 1..89: mol_type = other RNA
acagcttatttggaagctgaaatgtgaggtttataacactcacaagaatcctgaaaaaggatgccaaacgagcaacggcggaaggtggc

SEQ ID NO: 2796 - RNA, 89 nt, synthetic construct
  source 1..89: mol_type = other RNA
acagcttatttggaagctgaaatgtgaggtttataacactcacaagaatcctgaaaaaggatgccaaactgcggcctcatcagccaggc

SEQ ID NO: 2797 - RNA, 89 nt, synthetic construct
  source 1..89: mol_type = other RNA
acagcttatttggaagctgaaatgtgaggtttataacactcacaagaatcctgaaaaaggatgccaaacccaactcagaggcgtgctga

SEQ ID NO: 2798 - RNA, 89 nt, synthetic construct
  source 1..89: mol_type = other RNA
acagcttatttggaagctgaaatgtgaggtttataacactcacaagaatcctgaaaaaggatgccaaacactaacttctcctgggccct

SEQ ID NO: 2799 - RNA, 89 nt, synthetic construct
  source 1..89: mol_type = other RNA
acagcttatttggaagctgaaatgtgaggtttataacactcacaagaatcctgaaaaaggatgccaaacacttctcctgggccctcctc

SEQ ID NO: 2800 - RNA, 89 nt, synthetic construct
  source 1..89: mol_type = other RNA
acagcttatttggaagctgaaatgtgaggtttataacactcacaagaatcctgaaaaaggatgccaaaccgtggagtgccgacttcccg

SEQ ID NO: 2801 - RNA, 89 nt, synthetic construct
  source 1..89: mol_type = other RNA
acagcttatttggaagctgaaatgtgaggtttataacactcacaagaatcctgaaaaaggatgccaaacggccctcctcctgtgaccca

SEQ ID NO: 2802 - RNA, 89 nt, synthetic construct
  source 1..89: mol_type = other RNA
acagcttatttggaagctgaaatgtgaggtttataacactcacaagaatcctgaaaaaggatgccaaacagcagagaagacccccgaag

SEQ ID NO: 2803 - RNA, 89 nt, synthetic construct
  source 1..89: mol_type = other RNA
acagcttatttggaagctgaaatgtgaggtttataacactcacaagaatcctgaaaaaggatgccaaacggactcggggcacttggctc

SEQ ID NO: 2804 - RNA, 89 nt, synthetic construct
  source 1..89: mol_type = other RNA
acagcttatttggaagctgaaatgtgaggtttataacactcacaagaatcctgaaaaaggatgccaaaccgcgtccacgtgaaggtgga

SEQ ID NO: 2805 - RNA, 89 nt, synthetic construct
  source 1..89: mol_type = other RNA
acagcttatttggaagctgaaatgtgaggtttataacactcacaagaatcctgaaaaaggatgccaaacagccccacctctttagcatt

SEQ ID NO: 2806 - RNA, 89 nt, synthetic construct
  source 1..89: mol_type = other RNA
acagcttatttggaagctgaaatgtgaggtttataacactcacaagaatcctgaaaaaggatgccaaacgagtgccgacttcccgactt

SEQ ID NO: 2807 - RNA, 89 nt, synthetic construct
  source 1..89: mol_type = other RNA
acagcttatttggaagctgaaatgtgaggtttataacactcacaagaatcctgaaaaaggatgccaaaccctgcctaaactttgcactc

SEQ ID NO: 2808 - RNA, 89 nt, synthetic construct
  source 1..89: mol_type = other RNA
acagcttatttggaagctgaaatgtgaggtttataacactcacaagaatcctgaaaaaggatgccaaactctctggggagccaaggact

SEQ ID NO: 2809 - RNA, 89 nt, synthetic construct
  source 1..89: mol_type = other RNA
acagcttatttggaagctgaaatgtgaggtttataacactcacaagaatcctgaaaaaggatgccaaacgggtgtgggtactggacgcc

SEQ ID NO: 2810 - RNA, 89 nt, synthetic construct
  source 1..89: mol_type = other RNA
acagcttatttggaagctgaaatgtgaggtttataacactcacaagaatcctgaaaaaggatgccaaacgcctcagaaagagagagaga

SEQ ID NO: 2811 - RNA, 89 nt, synthetic construct
  source 1..89: mol_type = other RNA
acagcttatttggaagctgaaatgtgaggtttataacactcacaagaatcctgaaaaaggatgccaaaccgcgcggcctcgggaaggac

SEQ ID NO: 2812 - RNA, 89 nt, synthetic construct
  source 1..89: mol_type = other RNA
acagcttatttggaagctgaaatgtgaggtttataacactcacaagaatcctgaaaaaggatgccaaaccactccatccagcctgtatc

SEQ ID NO: 2813 - RNA, 89 nt, synthetic construct
  source 1..89: mol_type = other RNA
acagcttatttggaagctgaaatgtgaggtttataacactcacaagaatcctgaaaaaggatgccaaacggacgggagggcgagcatca

SEQ ID NO: 2814 - RNA, 89 nt, synthetic construct
  source 1..89: mol_type = other RNA
acagcttatttggaagctgaaatgtgaggtttataacactcacaagaatcctgaaaaaggatgccaaacggctgcaaacgggacctgtt

SEQ ID NO: 2815 - RNA, 89 nt, synthetic construct
  source 1..89: mol_type = other RNA
acagcttatttggaagctgaaatgtgaggtttataacactcacaagaatcctgaaaaaggatgccaaactgacccatgactcttcactg

SEQ ID NO: 2816 - RNA, 89 nt, synthetic construct
  source 1..89: mol_type = other RNA
acagcttatttggaagctgaaatgtgaggtttataacactcacaagaatcctgaaaaaggatgccaaacaaggtggaagccttctgggg

SEQ ID NO: 2817 - RNA, 89 nt, synthetic construct
  source 1..89: mol_type = other RNA
acagcttatttggaagctgaaatgtgaggtttataacactcacaagaatcctgaaaaaggatgccaaacgctcagtcctctagcctcag

SEQ ID NO: 2818 - RNA, 89 nt, synthetic construct
  source 1..89: mol_type = other RNA
acagcttatttggaagctgaaatgtgaggtttataacactcacaagaatcctgaaaaaggatgccaaaccctaaactttgcactccatc

SEQ ID NO: 2819 - RNA, 89 nt, synthetic construct
  source 1..89: mol_type = other RNA
acagcttatttggaagctgaaatgtgaggtttataacactcacaagaatcctgaaaaaggatgccaaaccggcctcatcagccaggcca

SEQ ID NO: 2820 - RNA, 89 nt, synthetic construct
  source 1..89: mol_type = other RNA
acagcttatttggaagctgaaatgtgaggtttataacactcacaagaatcctgaaaaaggatgccaaacgggcacagtagcagcaacag

SEQ ID NO: 2821 - RNA, 89 nt, synthetic construct
  source 1..89: mol_type = other RNA
acagcttatttggaagctgaaatgtgaggtttataacactcacaagaatcctgaaaaaggatgccaaactgggtactggacgcctgggg

SEQ ID NO: 2822 - RNA, 89 nt, synthetic construct
  source 1..89: mol_type = other RNA
acagcttatttggaagctgaaatgtgaggtttataacactcacaagaatcctgaaaaaggatgccaaacggcaccagcgccggtggggc

SEQ ID NO: 2823 - RNA, 89 nt, synthetic construct
  source 1..89: mol_type = other RNA
acagcttatttggaagctgaaatgtgaggtttataacactcacaagaatcctgaaaaaggatgccaaacggtactggacgcctgggggc

SEQ ID NO: 2824 - RNA, 89 nt, synthetic construct
  source 1..89: mol_type = other RNA
acagcttatttggaagctgaaatgtgaggtttataacactcacaagaatcctgaaaaaggatgccaaacgcctccagccctctgctcct

SEQ ID NO: 2825 - RNA, 89 nt, synthetic construct
  source 1..89: mol_type = other RNA
acagcttatttggaagctgaaatgtgaggtttataacactcacaagaatcctgaaaaaggatgccaaacggtgcccatcggggcgagga

SEQ ID NO: 2826 - RNA, 89 nt, synthetic construct
  source 1..89: mol_type = other RNA
acagcttatttggaagctgaaatgtgaggtttataacactcacaagaatcctgaaaaaggatgccaaaccaaacgggacctgttacatt

SEQ ID NO: 2827 - RNA, 89 nt, synthetic construct
  source 1..89: mol_type = other RNA
acagcttatttggaagctgaaatgtgaggtttataacactcacaagaatcctgaaaaaggatgccaaacaaggatcaggtttcggcctc

SEQ ID NO: 2828 - RNA, 89 nt, synthetic construct
  source 1..89: mol_type = other RNA
acagcttatttggaagctgaaatgtgaggtttataacactcacaagaatcctgaaaaaggatgccaaacgctccggggctgcgggccgt

SEQ ID NO: 2829 - RNA, 89 nt, synthetic construct
  source 1..89: mol_type = other RNA
acagcttatttggaagctgaaatgtgaggtttataacactcacaagaatcctgaaaaaggatgccaaacttaactaacttctcctgggc

SEQ ID NO: 2830 - RNA, 89 nt, synthetic construct
  source 1..89: mol_type = other RNA
acagcttatttggaagctgaaatgtgaggtttataacactcacaagaatcctgaaaaaggatgccaaacggatttggggttttgtcctc

SEQ ID NO: 2831 - RNA, 89 nt, synthetic construct
  source 1..89: mol_type = other RNA
acagcttatttggaagctgaaatgtgaggtttataacactcacaagaatcctgaaaaaggatgccaaacgggattaagaggggggaatg

SEQ ID NO: 2832 - RNA, 89 nt, synthetic construct
  source 1..89: mol_type = other RNA
acagcttatttggaagctgaaatgtgaggtttataacactcacaagaatcctgaaaaaggatgccaaacgcctggctgatgaggccgca

SEQ ID NO: 2833 - RNA, 89 nt, synthetic construct
  source 1..89: mol_type = other RNA
acagcttatttggaagctgaaatgtgaggtttataacactcacaagaatcctgaaaaaggatgccaaacgagtgcaaagtttaggcagg

SEQ ID NO: 2834 - RNA, 89 nt, synthetic construct
  source 1..89: mol_type = other RNA
acagcttatttggaagctgaaatgtgaggtttataacactcacaagaatcctgaaaaaggatgccaaacgccgctgttgccgctgttgc

SEQ ID NO: 2835 - RNA, 89 nt, synthetic construct
  source 1..89: mol_type = other RNA
acagcttatttggaagctgaaatgtgaggtttataacactcacaagaatcctgaaaaaggatgccaaaccccaggacgaggatggagat

SEQ ID NO: 2836 - RNA, 89 nt, synthetic construct
  source 1..89: mol_type = other RNA
acagcttatttggaagctgaaatgtgaggtttataacactcacaagaatcctgaaaaaggatgccaaacacaggtcccgtttgcagccc

SEQ ID NO: 2837 - RNA, 89 nt, synthetic construct
  source 1..89: mol_type = other RNA
acagcttatttggaagctgaaatgtgaggtttataacactcacaagaatcctgaaaaaggatgccaaacctgctactgtgccccaccgg

SEQ ID NO: 2838 - RNA, 89 nt, synthetic construct
  source 1..89: mol_type = other RNA
acagcttatttggaagctgaaatgtgaggtttataacactcacaagaatcctgaaaaaggatgccaaacgctgggagaccccggaaatg

SEQ ID NO: 2839 - RNA, 89 nt, synthetic construct
  source 1..89: mol_type = other RNA
acagcttatttggaagctgaaatgtgaggtttataacactcacaagaatcctgaaaaaggatgccaaacccgctgttgccgccgctgct

SEQ ID NO: 2840 - RNA, 89 nt, synthetic construct
  source 1..89: mol_type = other RNA
acagcttatttggaagctgaaatgtgaggtttataacactcacaagaatcctgaaaaaggatgccaaactcctcactctgagcgtcatt

SEQ ID NO: 2841 - RNA, 89 nt, synthetic construct
  source 1..89: mol_type = other RNA
acagcttatttggaagctgaaatgtgaggtttataacactcacaagaatcctgaaaaaggatgccaaacccccaccggcgctggtgccc

SEQ ID NO: 2842 - RNA, 89 nt, synthetic construct
  source 1..89: mol_type = other RNA
acagcttatttggaagctgaaatgtgaggtttataacactcacaagaatcctgaaaaaggatgccaaacgggctcggggtggcgtgatc

SEQ ID NO: 2843 - RNA, 89 nt, synthetic construct
  source 1..89: mol_type = other RNA
acagcttatttggaagctgaaatgtgaggtttataacactcacaagaatcctgaaaaaggatgccaaaccgtggctgcggtggccgctg

SEQ ID NO: 2844 - RNA, 89 nt, synthetic construct
  source 1..89: mol_type = other RNA
acagcttatttggaagctgaaatgtgaggtttataacactcacaagaatcctgaaaaaggatgccaaacgggttggggtgatgctcttc

SEQ ID NO: 2845 - RNA, 89 nt, synthetic construct
  source 1..89: mol_type = other RNA
acagcttatttggaagctgaaatgtgaggtttataacactcacaagaatcctgaaaaaggatgccaaacctaaagaggtggggctcagc

SEQ ID NO: 2846 - RNA, 89 nt, synthetic construct
  source 1..89: mol_type = other RNA
acagcttatttggaagctgaaatgtgaggtttataacactcacaagaatcctgaaaaaggatgccaaacaagaggtggggctcagcacg

SEQ ID NO: 2847 - RNA, 89 nt, synthetic construct
  source 1..89: mol_type = other RNA
acagcttatttggaagctgaaatgtgaggtttataacactcacaagaatcctgaaaaaggatgccaaacaggaggattggagtggggat

SEQ ID NO: 2848 - RNA, 89 nt, synthetic construct
  source 1..89: mol_type = other RNA
acagcttatttggaagctgaaatgtgaggtttataacactcacaagaatcctgaaaaaggatgccaaacagaggggggaatgtaacagg

SEQ ID NO: 2849 - RNA, 89 nt, synthetic construct
  source 1..89: mol_type = other RNA
acagcttatttggaagctgaaatgtgaggtttataacactcacaagaatcctgaaaaaggatgccaaacaagagtcatgggtcacagga

SEQ ID NO: 2850 - RNA, 89 nt, synthetic construct
  source 1..89: mol_type = other RNA
acagcttatttggaagctgaaatgtgaggtttataacactcacaagaatcctgaaaaaggatgccaaacatattgttggagggagaagt

SEQ ID NO: 2851 - RNA, 89 nt, synthetic construct
  source 1..89: mol_type = other RNA
acagcttatttggaagctgaaatgtgaggtttataacactcacaagaatcctgaaaaaggatgccaaacccgccgctgctgctgctgtt

SEQ ID NO: 2852 - RNA, 89 nt, synthetic construct
  source 1..89: mol_type = other RNA
acagcttatttggaagctgaaatgtgaggtttataacactcacaagaatcctgaaaaaggatgccaaacctgctgctgttgctgctact

SEQ ID NO: 2853 - RNA, 89 nt, synthetic construct
  source 1..89: mol_type = other RNA
acagcttatttggaagctgaaatgtgaggtttataacactcacaagaatcctgaaaaaggatgccaaaccaaagtttaggcaggtagcg

SEQ ID NO: 2854 - RNA, 89 nt, synthetic construct
  source 1..89: mol_type = other RNA
acagcttatttggaagctgaaatgtgaggtttataacactcacaagaatcctgaaaaaggatgccaaacagccagtccttggctcccca

SEQ ID NO: 2855 - RNA, 89 nt, synthetic construct
  source 1..89: mol_type = other RNA
acagcttatttggaagctgaaatgtgaggtttataacactcacaagaatcctgaaaaaggatgccaaacctactgtgccccaccggcgc

SEQ ID NO: 2856 - RNA, 89 nt, synthetic construct
  source 1..89: mol_type = other RNA
acagcttatttggaagctgaaatgtgaggtttataacactcacaagaatcctgaaaaaggatgccaaacttgccgctgttgccgccgct

SEQ ID NO: 2857 - RNA, 89 nt, synthetic construct
  source 1..89: mol_type = other RNA
acagcttatttggaagctgaaatgtgaggtttataacactcacaagaatcctgaaaaaggatgccaaaccggtggccgctgttgccgct

SEQ ID NO: 2858 - RNA, 89 nt, synthetic construct
  source 1..89: mol_type = other RNA
acagcttatttggaagctgaaatgtgaggtttataacactcacaagaatcctgaaaaaggatgccaaacgtgcccaggacgaggatgga

SEQ ID NO: 2859 - RNA, 89 nt, synthetic construct
  source 1..89: mol_type = other RNA
acagcttatttggaagctgaaatgtgaggtttataacactcacaagaatcctgaaaaaggatgccaaaccagcccaattaggatttggg

SEQ ID NO: 2860 - RNA, 89 nt, synthetic construct
  source 1..89: mol_type = other RNA
acagcttatttggaagctgaaatgtgaggtttataacactcacaagaatcctgaaaaaggatgccaaacctgtgccccaccggcgctgg

SEQ ID NO: 2861 - RNA, 89 nt, synthetic construct
  source 1..89: mol_type = other RNA
acagcttatttggaagctgaaatgtgaggtttataacactcacaagaatcctgaaaaaggatgccaaacacgctgtctggggagggcga

SEQ ID NO: 2862 - RNA, 89 nt, synthetic construct
  source 1..89: mol_type = other RNA
acagcttatttggaagctgaaatgtgaggtttataacactcacaagaatcctgaaaaaggatgccaaaccaggtgagcccaaggagcag

SEQ ID NO: 2863 - RNA, 89 nt, synthetic construct
  source 1..89: mol_type = other RNA
acagcttatttggaagctgaaatgtgaggtttataacactcacaagaatcctgaaaaaggatgccaaacaagagctgatgctcgccctc

SEQ ID NO: 2864 - RNA, 89 nt, synthetic construct
  source 1..89: mol_type = other RNA
acagcttatttggaagctgaaatgtgaggtttataacactcacaagaatcctgaaaaaggatgccaaacatgtttaatcagagaggatc

SEQ ID NO: 2865 - RNA, 89 nt, synthetic construct
  source 1..89: mol_type = other RNA
acagcttatttggaagctgaaatgtgaggtttataacactcacaagaatcctgaaaaaggatgccaaacatcagagaggatcttccgat

SEQ ID NO: 2866 - RNA, 89 nt, synthetic construct
  source 1..89: mol_type = other RNA
acagcttatttggaagctgaaatgtgaggtttataacactcacaagaatcctgaaaaaggatgccaaacagttggcaccccgcctgagg

SEQ ID NO: 2867 - RNA, 89 nt, synthetic construct
  source 1..89: mol_type = other RNA
acagcttatttggaagctgaaatgtgaggtttataacactcacaagaatcctgaaaaaggatgccaaacatgctcgccctcccgtccca

SEQ ID NO: 2868 - RNA, 89 nt, synthetic construct
  source 1..89: mol_type = other RNA
acagcttatttggaagctgaaatgtgaggtttataacactcacaagaatcctgaaaaaggatgccaaaccaggggtggctgggagaccc

SEQ ID NO: 2869 - RNA, 89 nt, synthetic construct
  source 1..89: mol_type = other RNA
acagcttatttggaagctgaaatgtgaggtttataacactcacaagaatcctgaaaaaggatgccaaacccaggcaacggcgttgcttt

SEQ ID NO: 2870 - RNA, 89 nt, synthetic construct
  source 1..89: mol_type = other RNA
acagcttatttggaagctgaaatgtgaggtttataacactcacaagaatcctgaaaaaggatgccaaacgggtgcaggtgagcccaagg

SEQ ID NO: 2871 - RNA, 89 nt, synthetic construct
  source 1..89: mol_type = other RNA
acagcttatttggaagctgaaatgtgaggtttataacactcacaagaatcctgaaaaaggatgccaaactaacaggtcccgtttgcagc

SEQ ID NO: 2872 - RNA, 89 nt, synthetic construct
  source 1..89: mol_type = other RNA
acagcttatttggaagctgaaatgtgaggtttataacactcacaagaatcctgaaaaaggatgccaaacgtaccggggcccgttaatgt

SEQ ID NO: 2873 - RNA, 89 nt, synthetic construct; identical to SEQ ID NO: 2192
  source 1..89: mol_type = other RNA

SEQ ID NO: 2874 - RNA, 89 nt, synthetic construct
  source 1..89: mol_type = other RNA
acagcttatttggaagctgaaatgtgaggtttataacactcacaagaatcctgaaaaaggatgccaaacgctgcggtggccgctgttgc

SEQ ID NO: 2875 - RNA, 89 nt, synthetic construct
  source 1..89: mol_type = other RNA
acagcttatttggaagctgaaatgtgaggtttataacactcacaagaatcctgaaaaaggatgccaaaccaggctggatggagtgcaaa

SEQ ID NO: 2876 - RNA, 89 nt, synthetic construct
  source 1..89: mol_type = other RNA
acagcttatttggaagctgaaatgtgaggtttataacactcacaagaatcctgaaaaaggatgccaaacgggtgatgctcttcgggggt

SEQ ID NO: 2877 - RNA, 89 nt, synthetic construct
  source 1..89: mol_type = other RNA
acagcttatttggaagctgaaatgtgaggtttataacactcacaagaatcctgaaaaaggatgccaaacatcctttagtaccggggccc

SEQ ID NO: 2878 - RNA, 89 nt, synthetic construct
  source 1..89: mol_type = other RNA
acagcttatttggaagctgaaatgtgaggtttataacactcacaagaatcctgaaaaaggatgccaaacgcgggaagtcgggaagtcgg

SEQ ID NO: 2879 - RNA, 89 nt, synthetic construct
  source 1..89: mol_type = other RNA
acagcttatttggaagctgaaatgtgaggtttataacactcacaagaatcctgaaaaaggatgccaaactttaatcagagaggatcttc

SEQ ID NO: 2880 - RNA, 89 nt, synthetic construct
  source 1..89: mol_type = other RNA
acagcttatttggaagctgaaatgtgaggtttataacactcacaagaatcctgaaaaaggatgccaaaccccacaccccagaaggcttc

SEQ ID NO: 2881 - RNA, 89 nt, synthetic construct
  source 1..89: mol_type = other RNA
acagcttatttggaagctgaaatgtgaggtttataacactcacaagaatcctgaaaaaggatgccaaacgaggactgagccagtccttg

SEQ ID NO: 2882 - RNA, 89 nt, synthetic construct
  source 1..89: mol_type = other RNA
acagcttatttggaagctgaaatgtgaggtttataacactcacaagaatcctgaaaaaggatgccaaacggcaggtagcgggaagtcgg

SEQ ID NO: 2883 - RNA, 89 nt, synthetic construct
  source 1..89: mol_type = other RNA
acagcttatttggaagctgaaatgtgaggtttataacactcacaagaatcctgaaaaaggatgccaaacgccgtctggtggtctctaag

SEQ ID NO: 2884 - RNA, 89 nt, synthetic construct
  source 1..89: mol_type = other RNA
acagcttatttggaagctgaaatgtgaggtttataacactcacaagaatcctgaaaaaggatgccaaacccccgagtcccaggcgtcca

SEQ ID NO: 2885 - RNA, 89 nt, synthetic construct
  source 1..89: mol_type = other RNA
acagcttatttggaagctgaaatgtgaggtttataacactcacaagaatcctgaaaaaggatgccaaacgggttttgtcctcactctga

SEQ ID NO: 2886 - RNA, 89 nt, synthetic construct
  source 1..89: mol_type = other RNA
acagcttatttggaagctgaaatgtgaggtttataacactcacaagaatcctgaaaaaggatgccaaacctcgccctcccgtcccagga

SEQ ID NO: 2887 - RNA, 89 nt, synthetic construct
  source 1..89: mol_type = other RNA
acagcttatttggaagctgaaatgtgaggtttataacactcacaagaatcctgaaaaaggatgccaaacctccaaggtatgggtgccag

SEQ ID NO: 2888 - RNA, 89 nt, synthetic construct
  source 1..89: mol_type = other RNA
acagcttatttggaagctgaaatgtgaggtttataacactcacaagaatcctgaaaaaggatgccaaactgaagagctgatgctcgccc

SEQ ID NO: 2889 - RNA, 89 nt, synthetic construct
  source 1..89: mol_type = other RNA
acagcttatttggaagctgaaatgtgaggtttataacactcacaagaatcctgaaaaaggatgccaaacctgctgttgctgctactgtg

SEQ ID NO: 2890 - RNA, 89 nt, synthetic construct
  source 1..89: mol_type = other RNA
acagcttatttggaagctgaaatgtgaggtttataacactcacaagaatcctgaaaaaggatgccaaacctgttgctgctactgtgccc

SEQ ID NO: 2891 - RNA, 89 nt, synthetic construct
  source 1..89: mol_type = other RNA
acagcttatttggaagctgaaatgtgaggtttataacactcacaagaatcctgaaaaaggatgccaaacgctgatgaggccgcacatgt

SEQ ID NO: 2892 - RNA, 89 nt, synthetic construct
  source 1..89: mol_type = other RNA
acagcttatttggaagctgaaatgtgaggtttataacactcacaagaatcctgaaaaaggatgccaaacctctgcgtggctgcggtggc

SEQ ID NO: 2893 - RNA, 89 nt, synthetic construct
  source 1..89: mol_type = other RNA
acagcttatttggaagctgaaatgtgaggtttataacactcacaagaatcctgaaaaaggatgccaaacgccaccgccaccttccgccg

SEQ ID NO: 2894 - RNA, 89 nt, synthetic construct
  source 1..89: mol_type = other RNA
acagcttatttggaagctgaaatgtgaggtttataacactcacaagaatcctgaaaaaggatgccaaactgccccaccggcgctggtgc

SEQ ID NO: 2895 - RNA, 89 nt, synthetic construct
  source 1..89: mol_type = other RNA
acagcttatttggaagctgaaatgtgaggtttataacactcacaagaatcctgaaaaaggatgccaaacggcacccactgctctgcgtg

SEQ ID NO: 2896 - RNA, 89 nt, synthetic construct
  source 1..89: mol_type = other RNA
acagcttatttggaagctgaaatgtgaggtttataacactcacaagaatcctgaaaaaggatgccaaacatctcccggcccccaggcgt

SEQ ID NO: 2897 - RNA, 89 nt, synthetic construct
  source 1..89: mol_type = other RNA
acagcttatttggaagctgaaatgtgaggtttataacactcacaagaatcctgaaaaaggatgccaaacccggtgggctcccgttctct

SEQ ID NO: 2898 - RNA, 89 nt, synthetic construct
  source 1..89: mol_type = other RNA
acagcttatttggaagctgaaatgtgaggtttataacactcacaagaatcctgaaaaaggatgccaaacggagaccccggaaatgctaa

SEQ ID NO: 2899 - RNA, 89 nt, synthetic construct
  source 1..89: mol_type = other RNA
acagcttatttggaagctgaaatgtgaggtttataacactcacaagaatcctgaaaaaggatgccaaacggtgccaggcaacggcgttg

SEQ ID NO: 2900 - RNA, 89 nt, synthetic construct
  source 1..89: mol_type = other RNA
acagcttatttggaagctgaaatgtgaggtttataacactcacaagaatcctgaaaaaggatgccaaacgctccccagagacatcacgg

SEQ ID NO: 2901 - RNA, 89 nt, synthetic construct
  source 1..89: mol_type = other RNA
acagcttatttggaagctgaaatgtgaggtttataacactcacaagaatcctgaaaaaggatgccaaacaggccgcacatgtggccacc

SEQ ID NO: 2902 - RNA, 89 nt, synthetic construct
  source 1..89: mol_type = other RNA
acagcttatttggaagctgaaatgtgaggtttataacactcacaagaatcctgaaaaaggatgccaaactctggggagggcgaggccga

SEQ ID NO: 2903 - RNA, 89 nt, synthetic construct
  source 1..89: mol_type = other RNA
acagcttatttggaagctgaaatgtgaggtttataacactcacaagaatcctgaaaaaggatgccaaacttggagggagaagtacaggg

SEQ ID NO: 2904 - RNA, 89 nt, synthetic construct
  source 1..89: mol_type = other RNA
acagcttatttggaagctgaaatgtgaggtttataacactcacaagaatcctgaaaaaggatgccaaacttgctgctactgtgccccac

SEQ ID NO: 2905 - RNA, 89 nt, synthetic construct
  source 1..89: mol_type = other RNA
acagcttatttggaagctgaaatgtgaggtttataacactcacaagaatcctgaaaaaggatgccaaactgggtgccaggcaacggcgt

SEQ ID NO: 2906 - RNA, 89 nt, synthetic construct
  source 1..89: mol_type = other RNA
acagcttatttggaagctgaaatgtgaggtttataacactcacaagaatcctgaaaaaggatgccaaacggtcacaggaggagggccca

SEQ ID NO: 2907 - RNA, 89 nt, synthetic construct
  source 1..89: mol_type = other RNA
acagcttatttggaagctgaaatgtgaggtttataacactcacaagaatcctgaaaaaggatgccaaacgcgtgatctcccggccccca

SEQ ID NO: 2908 - RNA, 89 nt, synthetic construct
  source 1..89: mol_type = other RNA
acagcttatttggaagctgaaatgtgaggtttataacactcacaagaatcctgaaaaaggatgccaaactggccaccgccaccttccgc

SEQ ID NO: 2909 - RNA, 89 nt, synthetic construct
  source 1..89: mol_type = other RNA
acagcttatttggaagctgaaatgtgaggtttataacactcacaagaatcctgaaaaaggatgccaaacgagtggggattaagaggggg

SEQ ID NO: 2910 - RNA, 89 nt, synthetic construct
  source 1..89: mol_type = other RNA
acagcttatttggaagctgaaatgtgaggtttataacactcacaagaatcctgaaaaaggatgccaaacatgaggccgcacatgtggcc

SEQ ID NO: 2911 - RNA, 89 nt, synthetic construct
  source 1..89: mol_type = other RNA
acagcttatttggaagctgaaatgtgaggtttataacactcacaagaatcctgaaaaaggatgccaaactccttcccgaggccgcgcgc

SEQ ID NO: 2912 - RNA, 89 nt, synthetic construct
  source 1..89: mol_type = other RNA
acagcttatttggaagctgaaatgtgaggtttataacactcacaagaatcctgaaaaaggatgccaaacatgctcttcgggggtcttct

SEQ ID NO: 2913 - RNA, 89 nt, synthetic construct
  source 1..89: mol_type = other RNA
acagcttatttggaagctgaaatgtgaggtttataacactcacaagaatcctgaaaaaggatgccaaacgaggccagggagggaaggga

SEQ ID NO: 2914 - RNA, 89 nt, synthetic construct
  source 1..89: mol_type = other RNA
acagcttatttggaagctgaaatgtgaggtttataacactcacaagaatcctgaaaaaggatgccaaacttgttggagggagaagtaca

SEQ ID NO: 2915 - RNA, 89 nt, synthetic construct
  source 1..89: mol_type = other RNA
acagcttatttggaagctgaaatgtgaggtttataacactcacaagaatcctgaaaaaggatgccaaacagcccaaggagcagagggct

SEQ ID NO: 2916 - RNA, 89 nt, synthetic construct
  source 1..89: mol_type = other RNA
acagcttatttggaagctgaaatgtgaggtttataacactcacaagaatcctgaaaaaggatgccaaacagcgtcatttgacgctgtct

SEQ ID NO: 2917 - RNA, 89 nt, synthetic construct
  source 1..89: mol_type = other RNA
acagcttatttggaagctgaaatgtgaggtttataacactcacaagaatcctgaaaaaggatgccaaacttgccgccgctgctgctgct

SEQ ID NO: 2918 - RNA, 89 nt, synthetic construct
  source 1..89: mol_type = other RNA
acagcttatttggaagctgaaatgtgaggtttataacactcacaagaatcctgaaaaaggatgccaaacgcaccccgcctgaggaggat

SEQ ID NO: 2919 - RNA, 89 nt, synthetic construct
  source 1..89: mol_type = other RNA
acagcttatttggaagctgaaatgtgaggtttataacactcacaagaatcctgaaaaaggatgccaaacgacgcgcaggctgccggtgg

SEQ ID NO: 2920 - RNA, 89 nt, synthetic construct
  source 1..89: mol_type = other RNA
acagcttatttggaagctgaaatgtgaggtttataacactcacaagaatcctgaaaaaggatgccaaacggctcccgttctctctctct

SEQ ID NO: 2921 - RNA, 89 nt, synthetic construct
  source 1..89: mol_type = other RNA
acagcttatttggaagctgaaatgtgaggtttataacactcacaagaatcctgaaaaaggatgccaaacgttaatattgttggagggag

SEQ ID NO: 2922 - RNA, 89 nt, synthetic construct
  source 1..89: mol_type = other RNA
acagcttatttggaagctgaaatgtgaggtttataacactcacaagaatcctgaaaaaggatgccaaacgagattatgaagagctgatg

SEQ ID NO: 2923 - RNA, 89 nt, synthetic construct
  source 1..89: mol_type = other RNA
acagcttatttggaagctgaaatgtgaggtttataacactcacaagaatcctgaaaaaggatgccaaacctcatctagccgtctggtgg

SEQ ID NO: 2924 - RNA, 89 nt, synthetic construct
  source 1..89: mol_type = other RNA
acagcttatttggaagctgaaatgtgaggtttataacactcacaagaatcctgaaaaaggatgccaaacctttggggttggggtgatgc

SEQ ID NO: 2925 - RNA, 89 nt, synthetic construct
  source 1..89: mol_type = other RNA
acagcttatttggaagctgaaatgtgaggtttataacactcacaagaatcctgaaaaaggatgccaaacctcttcgggggtcttctctg

SEQ ID NO: 2926 - RNA, 89 nt, synthetic construct
  source 1..89: mol_type = other RNA
acagcttatttggaagctgaaatgtgaggtttataacactcacaagaatcctgaaaaaggatgccaaacgggctcagcacgcctctgag

SEQ ID NO: 2927 - RNA, 89 nt, synthetic construct
  source 1..89: mol_type = other RNA
acagcttatttggaagctgaaatgtgaggtttataacactcacaagaatcctgaaaaaggatgccaaacgatggagtgcaaagtttagg

SEQ ID NO: 2928 - RNA, 89 nt, synthetic construct
  source 1..89: mol_type = other RNA
acagcttatttggaagctgaaatgtgaggtttataacactcacaagaatcctgaaaaaggatgccaaacgagggagaagtacaggggtg

SEQ ID NO: 2929 - RNA, 89 nt, synthetic construct
  source 1..89: mol_type = other RNA
acagcttatttggaagctgaaatgtgaggtttataacactcacaagaatcctgaaaaaggatgccaaacaggctagaggactgagccag

SEQ ID NO: 2930 - RNA, 89 nt, synthetic construct
  source 1..89: mol_type = other RNA
acagcttatttggaagctgaaatgtgaggtttataacactcacaagaatcctgaaaaaggatgccaaacccggggcccgttaatgttta

SEQ ID NO: 2931 - RNA, 20 nt, synthetic construct
  source 1..20: mol_type = other RNA
gtagctgccttttggcagga

SEQ ID NO: 2932 - RNA, 20 nt, synthetic construct
  source 1..20: mol_type = other RNA
cggtcagagggacagagacc

SEQ ID NO: 2933 - RNA, 20 nt, synthetic construct
  source 1..20: mol_type = other RNA
cgcagtaggaatgctcaagc

SEQ ID NO: 2934 - RNA, 20 nt, synthetic construct
  source 1..20: mol_type = other RNA
acgggtgcacgtagctcagg

SEQ ID NO: 2935 - RNA, 20 nt, synthetic construct
  source 1..20: mol_type = other RNA
gagagaggcccagctactcg

SEQ ID NO: 2936 - RNA, 40 nt, synthetic construct
  source 1..40: mol_type = other RNA
attgctccttacgaggagacgtagctgccttttggcagga

SEQ ID NO: 2937 - RNA, 40 nt, synthetic construct
  source 1..40: mol_type = other RNA
attgctccttacgaggagaccggtcagagggacagagacc

SEQ ID NO: 2938 - RNA, 40 nt, synthetic construct
  source 1..40: mol_type = other RNA
attgctccttacgaggagaccgcagtaggaatgctcaagc

SEQ ID NO: 2939 - RNA, 40 nt, synthetic construct
  source 1..40: mol_type = other RNA
attgctccttacgaggagacacgggtgcacgtagctcagg

SEQ ID NO: 2940 - RNA, 40 nt, synthetic construct
  source 1..40: mol_type = other RNA
attgctccttacgaggagacgagagaggcccagctactcg

SEQ ID NO: 2941 - RNA, 20 nt, synthetic construct
  source 1..20: mol_type = other RNA
cggcaagactagcgcagaga

SEQ ID NO: 2942 - RNA, 40 nt, synthetic construct; identical to SEQ ID NO: 23
  source 1..40: mol_type = other RNA

SEQ ID NO: 2943 - RNA, 20 nt, synthetic construct
  source 1..20: mol_type = other RNA
cgcatgtgcagccattgcct

SEQ ID NO: 2944 - RNA, 88 nt, synthetic construct
  source 1..88: mol_type = other RNA
acagcttatttggaagctgaaatgtgaggtttataacactcacaagaatcctgaaaaggatgccaaaccagtgccaggtgaaaatcgc

SEQ ID NO: 2945 - RNA, 88 nt, synthetic construct
  source 1..88: mol_type = other RNA
acagcttatttggaagctgaaatgtgaggtttataacactcacaagaatcctgaaaaggatgccaaacgaacagggaggagcagagag

SEQ ID NO: 2946 - RNA, 88 nt, synthetic construct
  source 1..88: mol_type = other RNA
acagcttatttggaagctgaaatgtgaggtttataacactcacaagaatcctgaaaaggatgccaaactaggaacccggatggtgggg

SEQ ID NO: 2947 - RNA, 88 nt, synthetic construct
  source 1..88: mol_type = other RNA
acagcttatttggaagctgaaatgtgaggtttataacactcacaagaatcctgaaaaggatgccaaaccgggtgcacgtagctcaggc

SEQ ID NO: 2948 - RNA, 88 nt, synthetic construct
  source 1..88: mol_type = other RNA
acagcttatttggaagctgaaatgtgaggtttataacactcacaagaatcctgaaaaggatgccaaacagcgtcaattggagagaggc

SEQ ID NO: 2949 - RNA, 88 nt, synthetic construct
  source 1..88: mol_type = other RNA
acagcttatttggaagctgaaatgtgaggtttataacactcacaagaatcctgaaaaggatgccaaaccgcatgtgcagccattgcct

SEQ ID NO: 2950 - protein, 448 aa, synthetic construct
MSVLTRKVQLIPVGDKEERDRVYKYLRDGIEAQNRAMNLYMSGLYFAAINEASKEDRKELNQLYSRIATSSKGSAYTTDIEFPTGLASTSTLSMAVRQDFTKSLKDGLMYGRVSLPTYRKDNPLFVDVRFVALRGTKQKYNGLYHEYKSHTEFLDNLYSSDLKVYIKFANDITFQVIFGNPRKSSALRSEFQNIFEEYYKVCQSSIQFSGTKIILNMAMRIPDKEIELDEDVCVGVDLGIAIPAVCALNKNRYSRVSIGSKEDFLRVRTKIRNQRKRLQTNLKSSNGGHGRKKKMKPMDRFRDYEANWVQNYNHYVSRQVVDFAVKNKAKYINLQNLEGIRDDVKNEWLLSNWSYYQLQQYITYKAKTYGIEVRKINPYHTSQRCSCCGYEDAGNRPKKEKGQAYFKCLKCGEEMNADFNAARNIAMSTEFQSGKKTKKQKKEQHENK

SEQ ID NO: 2951 - RNA, 20 nt, synthetic construct
  source 1..20: mol_type = other RNA
tggattctgcggccgcgcca

SEQ ID NO: 2952 - RNA, 20 nt, synthetic construct
  source 1..20: mol_type = other RNA
cctgggacgcatgcgtaggg

SEQ ID NO: 2953 - RNA, 20 nt, synthetic construct
  source 1..20: mol_type = other RNA
ccgcaatggctcaggtttgt

SEQ ID NO: 2954 - RNA, 20 nt, synthetic construct
  source 1..20: mol_type = other RNA
ccgtaggtggcatcgccctc

SEQ ID NO: 2955 - RNA, 20 nt, synthetic construct
  source 1..20: mol_type = other RNA
ctcaccatggtggcgcggcc

SEQ ID NO: 2956 - RNA, 20 nt, synthetic construct
  source 1..20: mol_type = other RNA
tcgcgcggctccctacgcat

SEQ ID NO: 2957 - RNA, 20 nt, synthetic construct
  source 1..20: mol_type = other RNA
cgttgcaaatcactcctcag

SEQ ID NO: 2958 - RNA, 20 nt, synthetic construct
  source 1..20: mol_type = other RNA
cgtcgccgtccagctcgacc

SEQ ID NO: 2959 - RNA, 20 nt, synthetic construct
  source 1..20: mol_type = other RNA
tggattctgcggccgcgcca

SEQ ID NO: 2960 - RNA, 20 nt, synthetic construct
  source 1..20: mol_type = other RNA
cctgggacgcatgcgtaggg

SEQ ID NO: 2961 - RNA, 20 nt, synthetic construct
  source 1..20: mol_type = other RNA
ccgcaatggctcaggtttgt

SEQ ID NO: 2962 - RNA, 20 nt, synthetic construct
  source 1..20: mol_type = other RNA
ccgtaggtggcatcgccctc

SEQ ID NO: 2963 - RNA, 20 nt, synthetic construct
  source 1..20: mol_type = other RNA
ctcaccatggtggcgcggcc

SEQ ID NO: 2964 - RNA, 20 nt, synthetic construct
  source 1..20: mol_type = other RNA
tcgcgcggctccctacgcat

SEQ ID NO: 2965 - RNA, 20 nt, synthetic construct
  source 1..20: mol_type = other RNA
cgttgcaaatcactcctcag

SEQ ID NO: 2966 - RNA, 20 nt, synthetic construct
  source 1..20: mol_type = other RNA
cgtcgccgtccagctcgacc

SEQ ID NO: 2967 - RNA, 20 nt, synthetic construct
  source 1..20: mol_type = other RNA
tggattctgcggccgcgcca

SEQ ID NO: 2968 - RNA, 20 nt, synthetic construct
  source 1..20: mol_type = other RNA
cctgggacgcatgcgtaggg

SEQ ID NO: 2969 - RNA, 20 nt, synthetic construct
  source 1..20: mol_type = other RNA
ccgcaatggctcaggtttgt

SEQ ID NO: 2970 - RNA, 20 nt, synthetic construct
  source 1..20: mol_type = other RNA
ccgtaggtggcatcgccctc

SEQ ID NO: 2971 - RNA, 20 nt, synthetic construct
  source 1..20: mol_type = other RNA
ctcaccatggtggcgcggcc

SEQ ID NO: 2972 - RNA, 20 nt, synthetic construct
  source 1..20: mol_type = other RNA
tcgcgcggctccctacgcat

SEQ ID NO: 2973 - RNA, 20 nt, synthetic construct
  source 1..20: mol_type = other RNA
cgttgcaaatcactcctcag

SEQ ID NO: 2974 - RNA, 20 nt, synthetic construct
  source 1..20: mol_type = other RNA
cgtcgccgtccagctcgacc

SEQ ID NO: 2975 - RNA, 90 nt, synthetic construct
  source 1..90: mol_type = other RNA
gtcggggcggctgtacgcccttaagtcgaggcggaggcactcgataaatacctgaaaaggtatatacaactggattctgcggccgcgcca

SEQ ID NO: 2976 - RNA, 90 nt, synthetic construct
  source 1..90: mol_type = other RNA
gtcggggcggctgtacgcccttaagtcgaggcggaggcactcgataaatacctgaaaaggtatatacaaccctgggacgcatgcgtaggg

SEQ ID NO: 2977 - RNA, 90 nt, synthetic construct
  source 1..90: mol_type = other RNA
gtcggggcggctgtacgcccttaagtcgaggcggaggcactcgataaatacctgaaaaggtatatacaacccgcaatggctcaggtttgt

SEQ ID NO: 2978 - RNA, 90 nt, synthetic construct
  source 1..90: mol_type = other RNA
gtcggggcggctgtacgcccttaagtcgaggcggaggcactcgataaatacctgaaaaggtatatacaacccgtaggtggcatcgccctc

SEQ ID NO: 2979 - RNA, 90 nt, synthetic construct
  source 1..90: mol_type = other RNA
gtcggggcggctgtacgcccttaagtcgaggcggaggcactcgataaatacctgaaaaggtatatacaacctcaccatggtggcgcggcc

SEQ ID NO: 2980 - RNA, 90 nt, synthetic construct
  source 1..90: mol_type = other RNA
gtcggggcggctgtacgcccttaagtcgaggcggaggcactcgataaatacctgaaaaggtatatacaactcgcgcggctccctacgcat

SEQ ID NO: 2981 - RNA, 90 nt, synthetic construct
  source 1..90: mol_type = other RNA
gtcggggcggctgtacgcccttaagtcgaggcggaggcactcgataaatacctgaaaaggtatatacaaccgttgcaaatcactcctcag

SEQ ID NO: 2982 - RNA, 90 nt, synthetic construct
  source 1..90: mol_type = other RNA
gtcggggcggctgtacgcccttaagtcgaggcggaggcactcgataaatacctgaaaaggtatatacaaccgtcgccgtccagctcgacc

SEQ ID NO: 2983 - RNA, 97 nt, synthetic construct
  source 1..97: mol_type = other RNA
gtaggggtggttgtgcaccctgagcgggaggtttttaagcactcctgaattaccctatttgaaaaggtaaacacaactggattctgcggccgcgcca

SEQ ID NO: 2984 - RNA, 97 nt, synthetic construct
  source 1..97: mol_type = other RNA
gtaggggtggttgtgcaccctgagcgggaggtttttaagcactcctgaattaccctatttgaaaaggtaaacacaaccctgggacgcatgcgtaggg

SEQ ID NO: 2985 - RNA, 97 nt, synthetic construct
  source 1..97: mol_type = other RNA
gtaggggtggttgtgcaccctgagcgggaggtttttaagcactcctgaattaccctatttgaaaaggtaaacacaacccgcaatggctcaggtttgt

SEQ ID NO: 2986 - RNA, 97 nt, synthetic construct
  source 1..97: mol_type = other RNA
gtaggggtggttgtgcaccctgagcgggaggtttttaagcactcctgaattaccctatttgaaaaggtaaacacaacccgtaggtggcatcgccctc

SEQ ID NO: 2987 - RNA, 97 nt, synthetic construct
  source 1..97: mol_type = other RNA
gtaggggtggttgtgcaccctgagcgggaggtttttaagcactcctgaattaccctatttgaaaaggtaaacacaacctcaccatggtggcgcggcc

SEQ ID NO: 2988 - RNA, 97 nt, synthetic construct
  source 1..97: mol_type = other RNA
gtaggggtggttgtgcaccctgagcgggaggtttttaagcactcctgaattaccctatttgaaaaggtaaacacaactcgcgcggctccctacgcat

SEQ ID NO: 2989 - RNA, 97 nt, synthetic construct
  source 1..97: mol_type = other RNA
gtaggggtggttgtgcaccctgagcgggaggtttttaagcactcctgaattaccctatttgaaaaggtaaacacaaccgttgcaaatcactcctcag

SEQ ID NO: 2990 - RNA, 97 nt, synthetic construct
  source 1..97: mol_type = other RNA
gtaggggtggttgtgcaccctgagcgggaggtttttaagcactcctgaattaccctatttgaaaaggtaaacacaaccgtcgccgtccagctcgacc

SEQ ID NO: 2991 - RNA, 95 nt, synthetic construct
  source 1..95: mol_type = other RNA
gaggggccacttgtattggcctgagcaggagggtgtaattgccactcctgaatgacctgaaaaggttgatacaactggattctgcggccgcgcca

SEQ ID NO: 2992 - RNA, 95 nt, synthetic construct
  source 1..95: mol_type = other RNA
gaggggccacttgtattggcctgagcaggagggtgtaattgccactcctgaatgacctgaaaaggttgatacaaccctgggacgcatgcgtaggg

SEQ ID NO: 2993 - RNA, 95 nt, synthetic construct
  source 1..95: mol_type = other RNA
gaggggccacttgtattggcctgagcaggagggtgtaattgccactcctgaatgacctgaaaaggttgatacaacccgcaatggctcaggtttgt

SEQ ID NO: 2994 - RNA, 95 nt, synthetic construct
  source 1..95: mol_type = other RNA
gaggggccacttgtattggcctgagcaggagggtgtaattgccactcctgaatgacctgaaaaggttgatacaacccgtaggtggcatcgccctc

SEQ ID NO: 2995 - RNA, 95 nt, synthetic construct
  source 1..95: mol_type = other RNA
gaggggccacttgtattggcctgagcaggagggtgtaattgccactcctgaatgacctgaaaaggttgatacaacctcaccatggtggcgcggcc

SEQ ID NO: 2996 - RNA, 95 nt, synthetic construct
  source 1..95: mol_type = other RNA
gaggggccacttgtattggcctgagcaggagggtgtaattgccactcctgaatgacctgaaaaggttgatacaactcgcgcggctccctacgcat

SEQ ID NO: 2997 - RNA, 95 nt, synthetic construct
  source 1..95: mol_type = other RNA
gaggggccacttgtattggcctgagcaggagggtgtaattgccactcctgaatgacctgaaaaggttgatacaaccgttgcaaatcactcctcag

SEQ ID NO: 2998 - RNA, 95 nt, synthetic construct
  source 1..95: mol_type = other RNA
gaggggccacttgtattggcctgagcaggagggtgtaattgccactcctgaatgacctgaaaaggttgatacaaccgtcgccgtccagctcgacc

SEQ ID NO: 2999 - RNA, 20 nt, synthetic construct
  source 1..20: mol_type = other RNA
agcgtcaattggagagaggc

SEQ ID NO: 3000 - RNA, 20 nt, synthetic construct
  source 1..20: mol_type = other RNA
cagtgccaggtgaaaatcgc

SEQ ID NO: 3001 - RNA, 20 nt, synthetic construct
  source 1..20: mol_type = other RNA
gaacagggaggagcagagag

SEQ ID NO: 3002 - RNA, 20 nt, synthetic construct
  source 1..20: mol_type = other RNA
taggaacccggatggtgggg

SEQ ID NO: 3003 - RNA, 20 nt, synthetic construct
  source 1..20: mol_type = other RNA
cgggtgcacgtagctcaggc

SEQ ID NO: 3004 - protein, 1041 aa, synthetic construct
MAPKKKRKVGIHGVPAAMIKPTVSQFLTPGFKLIRNHSRTAGRKLKNEGEEACKKFVRENEIPKDECPNFQGGPAIANIIAKSREFTEWEIYQSSLAIQEVIFTLPKDKLPEPILKEEWRAQWLSEHGLDTVPYKEAAGLNLIIKNAVNTYKGVQVKVDNKNKNNLAKINRKNEIAKLNGEQEISFEEIKAFDDKGYLLQKPSPNKSIYCYQSVSPKPFITSKYHNVNLPEEYIGYYRKSNEPIVSPYQFDRLRIPIGEPGYVPKWQYTFLSKKENKRRKLSKRIKNVSPILGIICIKKDWCVFDMRGLLRTNHWKKYHKPTDSINDLFDYFTGDPVIDTKANVVRFRYKMENGIVNYKPVREKKGKELLENICDQNGSCKLATVDVGQNNPVAIGLFELKKVNGELTKTLISRHPTPIDFCNKITAYRERYDKLESSIKLDAIKQLTSEQKIEVDNYNNNFTPQNTKQIVCSKLNINPNDLPWDKMISGTHFISEKAQVSNKSEIYFTSTDKGKTKDVMKSDYKWFQDYKPKLSKEVRDALSDIEWRLRRESLEFNKLSKSREQDARQLANWISSMCDVIGIQNLVKKNNFFGGSGKREPGWDNFYKPKKENRWWINAIHKALTELSQNKGKRVILLPAMRTSITCPKCKYCDSKNRNGEKFNCLKCGIELNADIDVATENLATVAITAQSMPKPTCERSGDAKKPVRARKAKAPEFHDKLAPSYTVVLREAVKRPAATKKAGQAKKKKEFGGPSSGAPPPSGGSPAGSPTSTEEGTSESATPESGPGTSTEPSEGSAPGSPAGSMGPMEIYKTVSAWKRQPVRVLSLFRNIDKVLKSLGFLESGSGSGGGTLKYVEDVTNVVRRDVEKWGPFDLVYGSTQPLGSSCDRCPGWYMFQFHRILQYALPRQESQRPFFWIFMDNLLLTEDDQETTTRFLQTEAVTLQDVRGRDYQNAMRVWSNIPGLKSKHAPLTPKEEEYLQAQVRSRSKLDAPKVDLLVKNCLLPLREYFKYFSQNSLPLGSPAGSPTSTEEGTSESATP

SEQ ID NO: 3005 - protein, 176 aa, synthetic construct
MDAKSLTAWSRTLVTFKDVFVDFTREEWKLLDTAQQIVYRNVMLENYKNLVSLGYQLTKPDVILRLEKGEEPWLVESGPGTSTEPSEGSAPGSPAMKDKVEKEKSEKETTSKKNSHKKTRPRLKNVDRSSAQHLEVTVGDLTVIITDFKEKTKSPPASSAASADQHSQSGSSSDNT

SEQ ID NO: 3006 - protein, 176 aa, synthetic construct
MDAKSLTAWSRTLVTFKDVFVDFTREEWKLLDTAQQIVYRNVMLENYKNLVSLGYQLTKPDVILRLEKGEEPWLVESGPGTSTEPSEGSAPGSPAMAEAFGDSEEDGEDVFEVEKILDMKTEGGKVLYKVRWKGYTSDDDTWEPEIHLEDCKEVLLEFRKKIAENKAKAVRKDIQR

SEQ ID NO: 3007 - protein, 176 aa, synthetic construct
MDAKSLTAWSRTLVTFKDVFVDFTREEWKLLDTAQQIVYRNVMLENYKNLVSLGYQLTKPDVILRLEKGEEPWLVESGPGTSTEPSEGSAPGSPAMPSEANSIQSANATTKTSETNHTSRPRLKNVDRSTAQQLAVTVGNVTVIITDFKEKTRSSSTSSSTVTSSAGSEQQNQSSS

SEQ ID NO: 3008 - protein, 173 aa, synthetic construct
MEEAEPDEFVVEKVLDRRVVNGKVEYFLKWEGFTDADNTWEPEENLDCPELIEAFLNSQKSRSSGGGSGGSGSMNNSQGRVTFEDVTVNFTQGEWQRLNPEQRNLYRDVMLENYSNLVSVGQGETTKPDVILRLEQGKEPWLEEEEVLGSGRAEKNGDIGGQIWKPKDVKESL

SEQ ID NO: 3009 - protein, 176 aa, synthetic construct
MEDEYVVEKVLDRRVVKGQVEYLLKWEGFSEEHNTWEPEKNLDCPELISEFMKKYKKMKEGENSRSSGGGSGGSGSMNNSQGRVTFEDVTVNFTQGEWQRLNPEQRNLYRDVMLENYSNLVSVGQGETTKPDVILRLEQGKEPWLEEEEVLGSGRAEKNGDIGGQIWKPKDVKESL

SEQ ID NO: 3010 - protein, 377 aa, synthetic construct
MSLITRKIQIYVSEEDKELKKQFVHTIYDWRNQIRRAANIVVSHKFTQENIKDFVYLKDEIKEKFYVKDILKEGKGMSEQNTTYRVLADLLKGKIPSDIYSCLNQAVAKTFKETKSEIFKGETALRSYKNNIPVPFSSDSIRNLHWEEKDKRFYFTLFGIPFATALGADRSNNKVIIERVLSGEYKLCQSSIQIDDRKKKMFLLLCVDIPKKEVKLNPDKKLYAFLGVFNPIVCTTEITDDLDAKNPYKVWEIGTEEEFNHRRRQIQEAVKRCQINSRYTEGGKGIKKKTKAIDRFHEKEKNYIDTKLHTYSRMLVDLAIKNECSEIVLMKQKEREEMAKEDNQNGKPFVLRNWSYYGLKDKISYKAKMVGIGITVE

SEQ ID NO: 3011 - protein, 382 aa, synthetic construct
MIITRKIEIYVNESDKDKKAEYYDRLFKILYTVHRFANLCASHLYFADNIADFVYLTTDARDKVKFSENLLTDSKKKDEGILISSYDNLVYELSKTFPEEERKGITKILADTGNRIIKAYKKKTDGESERLMIKRGKRSVKNYKLNIPIPFSKQSFKIEKSGNDYIFDFYHIPFKTKCGKDKSGNRIIINRLLAGEYDLSDSSIQYAKKYDRETGKAVSKWMLQLCVNIPETRLQAKKGVKVKADLNLVVPIIATCGKITREFGTKEEFLYQRIQIQSKLKNLQKSLRWANGGNGRKAKLQAIERFKLKEKNYIKTKLHAYSRALVNFAIKERAEKIELVNQKLKEEMAKDLEPVLRNWSYYGLKQMIEYKAMRVGINVELN

SEQ ID NO: 3012 - protein, 373 aa, synthetic construct
MPTVTRKIQLFFDIGDNPKELKALFKKWYEWQRIVRKAANQISTHLYIQDNIKDFFYITEDVKIKLKKSADDVAGILNTSKDNTTYQVLSKLFKGDCPMGMLSGLSSVIGNTYKKEKKEMFLGNKSLRSYKKDIPLPMRVRDSSNWTKHEDGNYSFSVYGTPFKTWFGHEKKKVTNDTHTKEYMLDMAMKGEVKFCDSSIQIKDNKFFLLAVFSWEKDVIKVDTENVADCYLSIKYPIIIKEGKDRMYTIGSEEEYLHGRNSIKAALQRVQTGAKYNQGGDGRELKLQSIERFKAAEKNFIENRMHVYARELIKYCLKHGKGKIVLNNYNEAKEQTHEGTEEANLLLASWSYYNLSDKIANKAAYHSIVVEKN

SEQ ID NO: 3013 - protein, 1096 aa, synthetic construct
MAPKKKRKVGIHGVPAAMIKPTVSQFLTPGFKLIRNHSRTAGRKLKNEGEEACKKFVRENEIPKDECPNFQGGPAIANIIAKSREFTEWEIYQSSLAIQEVIFTLPKDKLPEPILKEEWRAQWLSEHGLDTVPYKEAAGLNLIIKNAVNTYKGVQVKVDNKNKNNLAKINRKNEIAKLNGEQEISFEEIKAFDDKGYLLQKPSPNKSIYCYQSVSPKPFITSKYHNVNLPEEYIGYYRKSNEPIVSPYQFDRLRIPIGEPGYVPKWQYTFLSKKENKRRKLSKRIKNVSPILGIICIKKDWCVFDMRGLLRTNHWKKYHKPTDSINDLFDYFTGDPVIDTKANVVRFRYKMENGIVNYKPVREKKGKELLENICDQNGSCKLATVDVGQNNPVAIGLFELKKVNGELTKTLISRHPTPIDFCNKITAYRERYDKLESSIKLDAIKQLTSEQKIEVDNYNNNFTPQNTKQIVCSKLNINPNDLPWDKMISGTHFISEKAQVSNKSEIYFTSTDKGKTKDVMKSDYKWFQDYKPKLSKEVRDALSDIEWRLRRESLEFNKLSKSREQDARQLANWISSMCDVIGIQNLVKKNNFFGGSGKREPGWDNFYKPKKENRWWINAIHKALTELSQNKGKRVILLPAMRTSITCPKCKYCDSKNRNGEKFNCLKCGIELNADIDVATENLATVAITAQSMPKPTCERSGDAKKPVRARKAKAPEFHDKLAPSYTVVLREAVKRPAATKKAGQAKKKKEFGGPSSGAPPPSGGSPAGSPTSTEEGTSESATPESGPGTSTEPSEGSAPGSPAGSMGPMEIYKTVSAWKRQPVRVLSLFRNIDKVLKSLGFLESGSGSGGGTLKYVEDVTNVVRRDVEKWGPFDLVYGSTQPLGSSCDRCPGWYMFQFHRILQYALPRQESQRPFFWIFMDNLLLTEDDQETTTRFLQTEAVTLQDVRGRDYQNAMRVWSNIPGLKSKHAPLTPKEEEYLQAQVRSRSKLDAPKVDLLVKNCLLPLREYFKYFSQNSLPLMDAKSLTAWSRTLVTFKDVFVDFTREEWKLLDTAQQIVYRNVMLENYKNLVSLGYQLTKPDVILRLEKGEEPWLV

SEQ ID NO: 3014 - protein, 1116 aa, synthetic construct
MAPKKKRKVGIHGVPAAMIKPTVSQFLTPGFKLIRNHSRTAGRKLKNEGEEACKKFVRENEIPKDECPNFQGGPAIANIIAKSREFTEWEIYQSSLAIQEVIFTLPKDKLPEPILKEEWRAQWLSEHGLDTVPYKEAAGLNLIIKNAVNTYKGVQVKVDNKNKNNLAKINRKNEIAKLNGEQEISFEEIKAFDDKGYLLQKPSPNKSIYCYQSVSPKPFITSKYHNVNLPEEYIGYYRKSNEPIVSPYQFDRLRIPIGEPGYVPKWQYTFLSKKENKRRKLSKRIKNVSPILGIICIKKDWCVFDMRGLLRTNHWKKYHKPTDSINDLFDYFTGDPVIDTKANVVRFRYKMENGIVNYKPVREKKGKELLENICDQNGSCKLATVDVGQNNPVAIGLFELKKVNGELTKTLISRHPTPIDFCNKITAYRERYDKLESSIKLDAIKQLTSEQKIEVDNYNNNFTPQNTKQIVCSKLNINPNDLPWDKMTSGTHFISEKAQVSNKSEIYFTSTDKGKTKDVMKSDYKWFQDYKPKLSKEVRDALSDIEWRLRRESLEFNKLSKSREQDARQLANWISSMCDVIGIQNLVKKNNFFGGSGKREPGWDNFYKPKKENRWWINAIHKALTELSQNKGKRVILLPAMRTSITCPKCKYCDSKNRNGEKFNCLKCGIELNADIDVATENLATVAITAQSMPKPTCERSGDAKKPVRARKAKAPEFHDKLAPSYTVVLREAVKRPAATKKAGQAKKKKEFGGPSSGAPPPSGGSPAGSPTSTEEGTSESATPESGPGTSTEPSEGSAPGSPAGSMGPMEIYKTVSAWKRQPVRVLSLFRNIDKVLKSLGFLESGSGSGGGTLKYVEDVTNVVRRDVEKWGPFDLVYGSTQPLGSSCDRCPGWYMFQFHRILQYALPRQESQRPFFWIFMDNLLLTEDDQETTTRFLQTEAVTLQDVRGRDYQNAMRVWSNIPGLKSKHAPLTPKEEEYLQAQVRSRSKLDAPKVDLLVKNCLLPLREYFKYFSQNSLPLGSPAGSPTSTEEGTSESATPMDAKSLTAWSRTLVTFKDVFVDFTREEWKLLDTAQQIVYRNVMLENYKNLVSLGYQLTKPDVILRLEKGEEPWLV

SEQ ID NO: 3015 - protein, 1116 aa, synthetic construct
MAPKKKRKVGIHGVPAAMIKPTVSQFLTPGFKLIRNHSRTAGKKLKNEGEEACKKFVRENEIPKDECPNFQGGPAIANIIAKSREFTEWEIYQSSLAIQEVIFTLPKDKLPEPILKEEWRAQWLSEHGLDTVPYKEAAGLNLIIKNAVNTYKGVQVKVDNKNKNNLAKINRKNEIAKLNGEQEISFEEIKAFDDKGYLLQKPSPNKSIYCYQSVSPKPFITSKYHNVNLPEEYIGYYRKSNEPIVSPYQFDRLRIPIGEPGYVPKWQYTFLSKKENKRRKLSKRIKNVSPILGIICIKKDWCVFDMRGLLRTNHWKKYHKPTDSINDLFDYFTGDPVIDTKANVVRFRYKMENGIVNYKPVREKKGKELLENICDQNGSCKLATVDVGQNNPVAIGLFELKKVNGELTKTLISRHPTPIDFCNKITAYRERYDKLESSIKLDAIKQLTSEQKIEVDNYNNNFTPQNTKQIVCSKLNINPNDLPWDKMISGTHFISEKAQVSNKSEIYFTSTDKGKTKDVMKSDYKWFQDYKPKLSKEVRDALSDIEWRLRRESLEFNKLSKSREQDARQLANWISSMCDVIGIQNLVKKNNFFGGSGKREPGWDNFYKPKKENRWWINAIHKALTELSQNKGKRVILLPAMRTSITCPKCKYCDSKNRNGEKFNCLKCGIELNADIDVATENLATVAITAQSMPKPTCERSGDAKKPVRARKAKAPEFHDKLAPSYTVVLREAVKRPAATKKAGQAKKKKEFGGPSSGAPPPSGGSPAGSPTSTEEGTSESATPESGPGTSTEPSEGSAPGSPAGSMGPMEIYKTVSAWKRQPVRVLSLFRNIDKVLKSLGFLESGSGSGGGTLKYVEDVTNVVRRDVEKWGPFDLVYGSTQPLGSSCDRCPGWYMFQFHRILQYALPRQESQRPFFWIFMDNLLLTEDDQETTTRFLQTEAVTLQDVRGRDYQNAMRVWSNIPGLKSKHAPLTPKEEEYLQAQVRSRSKLDAPKVDLLVKNCLLPLREYFKYFSQNSLPLGSPAGSPTSTEEGTSESATPMDAKSLTAWSRTLVTFKDVFVDFTREEWKLLDTAQQIVYRNVMLENYKNLVSLGYQLTKPDVILRLEKGEEPWLV

SEQ ID NO: 3016 - protein, 1116 aa, synthetic construct
MAPKKKRKVGIHGVPAAMIKPTVSQFLTPGFKLIRNHSRTAGKKLKNEGEEACKKFVRENEIPKDECPNFQGGPAIANIIAKSREFTEWEIYQSSLAIQEVIFTLPKDKLPEPILKEEWRAQWLSEHGLDTVPYKEAAGLNLIIKNAVNTYKGVQVKVDNKNKNNLAKINRKNEIAKLNGEQEISFEEIKAFDDKGYLLQKPSPNKSIYCYQSVSPKPFITSKYHNVNLPEEYIGYYRKSNEPIVSPYQFDRLRIPIGEPGYVPKWQYTFLSKKENKRRKLSKRIKNVSPILGIICIKKDWCVFDMRGLLRTNHWKKYHKPTDSINDLFDYFTGDPVIDTKANVVRFRYKMENGIVNYKPVREKKGKELLENICDQNGSCKLATVDVGQNNPVAIGLFELKKVNGELTKTLISRHPTPIDFCNKITAYRERYDKLESSIKLDAIKQLTSEQKIEVDNYNNNFTPQNTKQIVCSKLNINPNDLPWDKMTSGTHFISEKAQVSNKSEIYFTSTDKGKTKDVMKSDYKWFQDYKPKLSKEVRDALSDIEWRLRRESLEFNKLSKSREQDARQLANWISSMCDVIGIQNLVKKNNFFGGSGKREPGWDNFYKPKKENRWWINAIHKALTELSQNKGKRVILLPAMRTSITCPKCKYCDSKNRNGEKFNCLKCGIELNADIDVATENLATVAITAQSMPKPTCERSGDAKKPVRARKAKAPEFHDKLAPSYTVVLREAVKRPAATKKAGQAKKKKEFGGPSSGAPPPSGGSPAGSPTSTEEGTSESATPESGPGTSTEPSEGSAPGSPAGSMGPMEIYKTVSAWKRQPVRVLSLFRNIDKVLKSLGFLESGSGSGGGTLKYVEDVTNVVRRDVEKWGPFDLVYGSTQPLGSSCDRCPGWYMFQFHRILQYALPRQESQRPFFWIFMDNLLLTEDDQETTTRFLQTEAVTLQDVRGRDYQNAMRVWSNIPGLKSKHAPLTPKEEEYLQAQVRSRSKLDAPKVDLLVKNCLLPLREYFKYFSQNSLPLGSPAGSPTSTEEGTSESATPMDAKSLTAWSRTLVTFKDVFVDFTREEWKLLDTAQQIVYRNVMLENYKNLVSLGYQLTKPDVILRLEKGEEPWLV

SEQ ID NO: 3017 - protein, 1215 aa, synthetic construct
MAPKKKRKVGIHGVPAAMIKPTVSQFLTPGFKLIRNHSRTAGRKLKNEGEEACKKFVRENEIPKDECPNFQGGPAIANIIAKSREFTEWEIYQSSLAIQEVIFTLPKDKLPEPILKEEWRAQWLSEHGLDTVPYKEAAGLNLIIKNAVNTYKGVQVKVDNKNKNNLAKINRKNEIAKLNGEQEISFEEIKAFDDKGYLLQKPSPNKSIYCYQSVSPKPFITSKYHNVNLPEEYIGYYRKSNEPIVSPYQFDRLRIPIGEPGYVPKWQYTFLSKKENKRRKLSKRIKNVSPILGIICIKKDWCVFDMRGLLRTNHWKKYHKPTDSINDLFDYFTGDPVIDTKANVVRFRYKMENGIVNYKPVREKKGKELLNICDQNGSCKLATVDVGQNNPVAIGLFELKKVNGELTKTLISRHPTPIDFCNKITAYRERYDKLESSIKLDAIKQLTSEQKIEVDNYNNNFTPQNTKQIVCSKLNINPNDLPWDKMISGTHFISEKAQVSNKSEIYFTSTDKGKTKDVMKSDYKWFQDYKPKLSKEVRDALSDIEWRLRRESLEFNKLSKSREQDARQLANWISSMCDVIGIQNLVKKNNFGGSGKREPGWDNFYKPKKENRWWINAIHKALTELSQNKGKRVILLPAMRTSITCPKCKYCDSKNRNGEKFNCLKCGIELNADIDVATENLATVAITAQSMPKPTCERSGDAKKPVRARKAKAPEFHDKLAPSYTVVLREAVKRPAATKKAGQAKKKKEFGGPSSGAPPPSGGSPAGSPTSTEEGTSESATPESGPGTSTEPSEGSAPGSPAGSMGPMEIYKTVSAWKRQPVRVLSLFRNIDKVLKSLGFLESGSGSGGGTLKYVEDVTNVVRRDVEKWGPFDLVYGSTQPLGSSCDRCPGWYMFQFHRILQYALPRQESQRPFFWIFMDNLLLTEDDQETTTRFLQTEAVTLQDVRGRDYQNAMRVWSNIPGLKSKHAPLTPKEEEYLQAQVRSRSKLDAPKVDLLVKNCLLPLREYFKYFSQNSLPLGSPAGSPTSTEEGTSESATPMDAKSLTAWSRTLVTFKDVFVDFTREEWKLLDTAQQIVYRNVMLENYKNLVSLGYQLTKPDVILRLEKGEEPWLVESGPGTSTEPSEGSAPGSPAMAEAFGDSEEDGEDVFEVEKILDMKTEGGKVLYKVRWKGYTSDDDTWEPEIHLEDCKEVLLEFRKKIAENKAKAVRKDIQR

SEQ ID NO: 3018 - protein, 1213 aa, synthetic construct
MAPKKKRKVGIHGVPAAMIKPTVSQFLTPGFKLIRNHSRTAGRKLKNEGEEACKKFVRENEIPKDECPNFQGGPAIANIIAKSREFTEWEIYQSSLAIQEVIFTLPKDKLPEPILKEEWRAQWLSEHGLDTVPYKEAAGLNLIIKNAVNTYKGVQVKVDNKNKNNLAKINRKNEIAKLNGEQEISFEEIKAFDDKGYLLQKPSPNKSIYCYQSVSPKPFITSKYHNVNLPEEYIGYYRKSNEPIVSPYQFDRLRIPIGEPGYVPKWQYTFLSKKENKRRKLSKRIKNVSPILGIICIKKDWCVFDMRGLLRTNHWKKYHKPTDSINDLFDYFTGDPVIDTKANVVRFRYKMENGIVNYKPVREKKGKELLNICDQNGSCKLATVDVGQNNPVAIGLFELKKVNGELTKTLISRHPTPIDFCNKITAYRERYDKLESSIKLDAIKQLTSEQKIEVDNYNNNFTPQNTKQIVCSKLNINPNDLPWDKMISGTHFISEKAQVSNKSEIYFTSTDKGKTKDVMKSDYKWFQDYKPKLSKEVRDALSDIEWRLRRESLEFNKLSKSREQDARQLANWISSMCDVIGIQNLVKKNNFFGGSGKREPGWDNFYKPKKENRWWINAIHKALTELSQNKGKRVILLPAMRTSITCPKCKYCDSKNRNGEKFNCLKCGIELNADIDVATENLATVAITAQSMPKPTCERSGDAKKPVRARKAKAPEFHDKLAPSYTVVLREAVKRPAATKKAGQAKKKKEFGGPSSGAPPPSGGSPAGSPTSTEEGTSESATPESGPGTSTEPSEGSAPGSPAGSMGPMEIYKTVSAWKRQPVRVLSLFRNIDKVLKSLGFLESGSGSGGGTLKYVEDVTNVVRRDVEKWGPFDLVYGSTQPLGSSCDRCPGWYMFQFHRILQYALPRQESQRPFFWIFMDNLLLTEDDQETTTRFLQTEAVTLQDVRGRDYQNAMRVWSNIPGLKSKHAPLTPKEEEYLQAQVRSRSKLDAPKVDLLVKNCLLPLREYFKYFSQNSLPLGSPAGSPTSTEEGTSESATPMEEAEPDEFVVEKVLDRRVVNGKVEYFLKWEGFTDADNTWEPEENLDCPELIEAFLNSQKSRSSGGGSGGSGSMNNSQGRVTFEDVTVNFTQGEWQRLNPEQRNLYRDVMLENYSNLVSVGQGETTKPDVILRLEQGKEPWLEEEEVLGSGRAEKNGDIGGQIWKPKDVKESL

SEQ ID NO: 3019 - protein, 1217 aa, synthetic construct
MAPKKKRKVGIHGVPAAMIKPTVSQFLTPGFKLIRNHSRTAGRKLKNEGEEACKKFVRENEIPKDECPNFQGGPAIANIIAKSREFTEWEIYQSSLAIQEVIFTLPKDKLPEPILKEEWRAQWLSEHGLDTVPYKEAAGLNLIIKNAVNTYKGVQVKVDNKNKNNLAKINRKNEIAKLNGEQEISFEEIKAFDDKGYLLQKPSPNKSIYCYQSVSPKPFITSKYHNVNLPEEYIGYYRKSNEPIVSPYQFDRLRIPIGEPGYVPKWQYTFLSKKENKRRKLSKRIKNVSPILGIICIKKDWCVFDMRGLLRTNHWKKYHKPTDSINDLFDYFTGDPVIDTKANVVRFRYKMENGIVNYKPVREKKGKELLENICDQNGSCKLATVDVGQNNPVAIGLFELKKVNGELTKTLISRHPTPIDFCNKITAYRERYDKLESSIKLDAIKQLTSEQKIEVDNYNNNFTPQNTKQIVCSKLNINPNDLPWDKMISGTHFISEKAQVSNKSEIYFTSTDKGKTKDVMKSDYKWFQDYKPKLSKEVRDALSDIEWRLRRESLEFNKLSKSREQDARQLANWISSMCDVIGIQNLVKKNNFFGGSGKREPGWDNFYKPKKENRWWINAIHKALTELSQNKGKRVILLPAMRTSITCPKCKYCDSKNRNGEKFNCLKCGIELNADIDVATENLATVAITAQSMPKPTCERSGDAKKPVRARKAKAPEFHDKLAPSYTVVLREAVKRPAATKKAGQAKKKKEFGGPSSGAPPPSGGSPAGSPTSTEEGTSESATPESGPGTSTEPSEGSAPGSPAGSMGPMEIYKTVSAWKRQPVRVLSLFRNIDKVLKSLGFLESGSGSGGGTLKYVEDVTNVVRRDVEKWGPFDLVYGSTQPLGSSCDRCPGWYMFQFHRILQYALPRQESQRPFFWIFMDNLLLTEDDQETTTRFLQTEAVTLQDVRGRDYQNAMRVWSNIPGLKSKHAPLTPKEEEYLQAQVRSRSKLDAPKVDLLVKNCLLPLREYFKYFSQNSLPLGSPAGSPTSTEEGTSESATPMEDEYVVEKVLDRRVVKGQVEYLLKWEGFSEEHNTWEPEKNLDCPELISEFMKKYKKMKEGENSRSSGGGSGGSGSMNNSQGRVTFEDVTVNFTQGEWQRLNPEQRNLYRDVMLENYSNLVSVGQGETTKPDVILRLEQGKEPWLEEEEVLGSGRAEKNGDIGGQIWKPKDVKESL

SEQ ID NO: 3020 - protein, 1115 aa, synthetic construct
MAPKKKRKVGIHGVPAAMIKPTVSQFLTPGFKLIRNHSRTAGLKLKNEGEEACKKFVRENEIPKDECPNFQGGPAIANIIAKSREFTEWEIYQSSLAIQEVIFTLPKDKLPEPILKEEWRAQWLSEHGLDTVPYKEAAGLNLIIKNAVNTYKGVQVKVDNKNKNNLAKINRKNEIAKLNGEQEISFEEIKAFDDKGYLLQKPSPNKSIYCYQSVSPKPFITSKYHNVNLPEEYIGYYRKSNEPIVSPYQFDRLRIPIGEPGYVPKWQYTFLSKKENKRRKLSKRIKNVSPILGIICIKKDWCVFDMRGLLRTNHWKKYHKPTDSINDLFDYFTGDPVIDTKANVVRFRYKMENGIVNYKPVREKKGKELLENICDQNGSCKLATVDVGQNNPVAIGLFELKKVNGELTKTLISRHPTPIDFCNKITAYRERYDKLESSIKLDAIKQLTSEQKIEVDNYNNNFTPQNTKQIVCSKLNINPNDLPWDKMISGTHFISEKAQVSNKSEIYFTSTDKGKTKDVMKSDYKWFQDYKPKLSKEVRDALSDIEWRLRRESLEFNKLSKSREQDARQLANWISSMCDVIGIQNLVKKNNFFGGSGKREPGWDNFYKPKKENRWWINAIHKALTELSQNKGKRVILLPAMRTSITCPKCKYCDSKNRNGEKNCLKCGIELNADIDVATENLATVAITAQSMPKPTCERSGDAKKPVRARKAKAPEFHDKLAPSYTVVLREAVKRPAATKKAGQAKKKKEFGGPSSGAPPPSGGSPAGSPTSTEEGTSESATPESGPGTSTEPSEGSAPGSPAGSMGPMEIYKTVSAWKRQPVRVLSLFRNIDKVLKSLGFLESGSGSGGGTLKYVEDVTNVVRRDVEKWGPFDLVYGSTQPLGSSCDRCPGWYMFQFHRILQYALPRQESQRPFFWIFMDNLLLTEDDQETTTRFLQTEAVTLQDVRGRDYQNAMRVWSNIPGLKSKHAPLTPKEEEYLQAQVRSRSKLDAPKVDLLVKNCLLPLREYFKYFSQNSLPLGSPAGSPTSTEEGTSESATPMDAKSLTAWSRTLVTFKDVFVDFTREEWKLLDTAQQIVYRNVMLENYKNLVSLGYQLTKPDVILRLEKGEEPWLV

SEQ ID NO: 3021 - protein, 1096 aa, synthetic construct; identical to SEQ ID NO: 3013

SEQ ID NO: 3022 - protein, 1141 aa, synthetic construct
MAPKKKRKVGIHGVPAAMIKPTVSQFLTPGFKLIRNHSRTAGKKLKNEGEEACKKFVRENEIPKDECPNFQGGPAIANIIAKSREFTEWEIYQSSLAIQEVIFTLPKDKLPEPILKEEWRAQWLSEHGLDTVPYKEAAGLNLIIKNAVNTYKGVQVKVDNKNKNNLAKINRKNEIAKLNGEQEISFEEIKAFDDKGYLLQKPSPNKSIYCYQSVSPKPFITSKYHNVNLPEEYIGYYRKSNEPIVSPYQFDRLRIPIGEPGYVPKWQYTFLSKKENKRRKLSKRIKNVSPILGIICIKKDWCVFDMRGLLRTNHWKKYHKPTDSINDLFDYFTGDPVIDTKANVVRFRYKMENGIVNYKPVREKKGKELLENICDQNGSCKLATVDVGQNNPVAIGLFELKKVNGELTKTLISRHPTPIDFCNKITAYRERYDKLESSIKLDAIKQLTSEQKIEVDNYNNNFTPQNTKQIVCSKLNINPNDLPWDKMTSGTHFISEKAQVSNKSEIYFTSTDKGKTKDVMKSDYKWFQDYKPKLSKEVRDALSDIEWRLRRESLEFNKLSKSREQDARQLANWISSMCDVIGIQNLVKKNNFFGGSGKREPGWDNFYKPKKENRWWINAIHKALTELSQNKGKRVILLPAMRTSITCPKCKYCDSKNRNGEKFNCLKCGIELNADIDVATENLATVAITAQSMPKPTCERSGDAKKPVRARKAKAPEFHDKLAPSYTVVLREAVKRPAATKKAGQAKKKKEFGGPSSGAPPPSGGSPAGSPTSTEEGTSESATPESGPGTSTEPSEGSAPGSPAGSMGPMEIYKTVSAWKRQPVRVLSLFRNIDKVLKSLGFLESGSGSGGGTLKYVEDVTNVVRRDVEKWGPFDLVYGSTQPLGSSCDRCPGWYMFQFHRILQYALPRQESQRPFFWIFMDNLLLTEDDQETTTRFLQTEAVTLQDVRGRDYQNAMRVWSNIPGLKSKHAPLTPKEEEYLQAQVRSRSKLDAPKVDLLVKNCLLPLREYFKYFSQNSLPLGSPAGSPTSTEEGTSESATPMNNSQGRVTFEDVTVNFTQGEWQRLNPEQRNLYRDVMLENYSNLVSVGQGETTKPDVILRLEQGKEPWLEEEEVLGSGRAEKNGDIGGQIWKPKDVKESL

SEQ ID NO: 3023 - protein, 1216 aa, synthetic construct
MAPKKKRKVGIHGVPAAMIKPTVSQFLTPGFKLIRNHSRTAGKKLKNEGEEACKKFVRENEIPKDECPNFQGGPAIANIIAKSREFTEWEIYQSSLAIQEVIFTLPKDKLPEPILKEEWRAQWLSEHGLDTVPYKEAAGLNLIIKNAVNTYKGVQVKVDNKNKNNLAKINRKNEIAKLNGEQEISFEEIKAFDDKGYLLQKPSPNKSIYCYQSVSPKPFITSKYHNVNLPEEYIGYYRKSNEPIVSPYQFDRLRIPIGEPGYVPKWQYTFLSKKENKRRKLSKRIKNVSPILGIICIKKDWCVFDMRGLLRTNHWKKYHKPTDSINDLFDYFTGDPVIDTKANVVRFRYKMENGIVNYKPVREKKGKELLENICDQNGSCKLATVDVGQNNPVAIGLFELKKVNGELTKTLISRHPTPIDFCNKITAYRERYDKLESSIKLDAIKQLTSEQKIEVDNYNNNFTPQNTKQIVCSKLNINPNDLPWDKMTSGTHFISEKAQVSNKSEIYFTSTDKGKTKDVMKSDYKWFQDYKPKLSKEVRDALSDIEWRLRRESLEFNKLSKSREQDARQLANWISSMCDVIGIQNLVKKNNFFGGSGKREPGWDNFYKPKKENRWWINAIHKALTELSQNKGKRVILLPAMRTSITCPKCKYCDSKNRNGEKFNCLKCGIELNADIDVATENLATVAITAQSMPKPTCERSGDAKKPVRARKAKAPEFHDKLAPSYTVVLREAVKRPAATKKAGQAKKKKEFGGPSSGAPPPSGGSPAGSPTSTEEGTSESATPESGPGTSTEPSEGSAPGSPAGMGPMEIYKTVSAWKRQPVRVLSLFRNIDKVLKSLGFLESGSGSGGGTLKYVEDVTNVVRRDVEKWGPFDLVYGSTQPLGSSCDRCPGWYMFQFHRILQYALPRQESQRPFFWIFMDNLLLTEDDQETTTRFLQTEAVTLQDVRGRDYQNAMRVWSNIPGLKSKHAPLTPKEEEYLQAQVRSRSKLDAPKVDLLVKNCLLPLREYFKYFSQNSLPLGSPAGSPTSTEEGTSESATPMDAKSLTAWSRTLVTFKDVFVDFTREEWKLLDTAQQIVYRNVMLENYKNLVSLGYQLTKPDVILRLEKGEEPWLVESGPGTSTEPSEGSAPGSPAMAEAFGDSEEDGEDVFEVEKILDMKTEGGKVLYKVRWKGYTSDDDTWEPEIHLEDCKEVLLEFRKKIAENKAKAVRKDIQR

SEQ ID NO: 3024 - protein, 1214 aa, synthetic construct
MAPKKKRKVGIHGVPAAMIKPTVSQFLTPGFKLIRNHSRTAGKKLKNEGEEACKKFVRENEIPKDECPNFQGGPAIANIIAKSREFTEWEIYQSSLAIQEVIFTLPKDKLPEPILKEEWRAQWLSEHGLDTVPYKEAAGLNLIIKNAVNTYKGVQVKVDNKNKNNLAKINRKNEIAKLNGEQEISFEEIKAFDDKGYLLQKPSPNKSIYCYQSVSPKPFITSKYHNVNLPEEYIGYYRKSNEPIVSPYQFDRLRIPIGEPGYVPKWQYTFLSKKENKRRKLSKRIKNVSPILGIICIKKDWCVFDMRGLLRTNHWKKYHKPTDSINDLFDYFTGDPVIDTKANVVRFRYKMENGIVNYKPVREKKGKELLENICDQNGSCKLATVDVGQNNPVAIGLFELKKVNGELTKTLISRHPTPIDFCNKITAYRERYDKLESSIKLDAIKQLTSEQKIEVDNYNNNFTPQNTKQIVCSKLNINPNDLPWDKMTSGTHFISEKAQVSNKSEIYFTSTDKGKTKDVMKSDYKWFQDYKPKLSKEVRDALSDIEWRLRRESLEFNKLSKSREQDARQLANWISSMCDVIGIQNLVKKNNFFGGSGKREPGWDNFYKPKKENRWWINAIHKALTELSQNKGKRVILLPAMRTSITCPKCKYCDSKNRNGEKFNCLKCGIELNADIDVATENLATVAITAQSMPKPTCERSGDAKKPVRARKAKAPEFHDKLAPSYTVVLREAVKRPAATKKAGQAKKKKEFGGPSSGAPPPSGGSPAGSPTSTEEGTSESATPESGPGTSTEPSEGSAPGSPAGSMGPMEIYKTVSAWKRQPVRVLSLFRNIDKVLKSLGFLESGSGSGGGTLKYVEDVTNVVRRDVEKWGPFDLVYGSTQPLGSSCDRCPGWYMFQFHRILQYALPRQESQRPFFWIFMDNLLLTEDDQETTTRFLQTEAVTLQDVRGRDYQNAMRVWSNIPGLKSKHAPLTPKEEEYLQAQVRSRSKLDAPKVDLLVKNCLLPLREYFKYFSQNSLPLGSPAGSPTSTEEGTSESATPMEEAEPDEFVVEKVLDRRVVNGKVEYFLKWEGFTDADNTWEPEENLDCPELIEAFLNSQKSRSSGGGSGGSGSMNNSQGRVTFEDVTVNFTQGEWQRLNPEQRNLYRDVMLENYSNLVSVGQGETTKPDVILRLEQGKEPWLEEEEVLGSGRAEKNGDIGGQIWKPKDVKESL

SEQ ID NO: 3025 - protein, 1217 aa, synthetic construct
MAPKKKRKVGIHGVPAAMIKPTVSQFLTPGFKLIRNHSRTAGKKLKNEGEEACKKFVRENEIPKDECPNFQGGPAIANIIAKSREFTEWEIYQSSLAIQEVIFTLPKDKLPEPILKEEWRAQWLSEHGLDTVPYKEAAGLNLIIKNAVNTYKGVQVKVDNKNKNNLAKINRKNEIAKLNGEQEISFEEIKAFDDKGYLLQKPSPNKSIYCYQSVSPKPFITSKYHNVNLPEEYIGYYRKSNEPIVSPYQFDRLRIPIGEPGYVPKWQYTFLSKKENKRRKLSKRIKNVSPILGIICIKKDWCVFDMRGLLRTNHWKKYHKPTDSINDLFDYFTGDPVIDTKANVVRFRYKMENGIVNYKPVREKKGKELLENICDQNGSCKLATVDVGQNNPVAIGLFELKKVNGELTKTLISRHPTPIDFCNKITAYRERYDKLESSIKLDAIKQLTSEQKIEVDNYNNNFTPQNTKQIVCSKLNINPNDLPWDKMTSGTHFISEKAQVSNKSEIYFTSTDKGKTKDVMKSDYKWFQDYKPKLSKEVRDALSDIEWRLRRESLEFNKLSKSREQDARQLANWISSMCDVIGIQNLVKKNNFFGGSGKREPGWDNFYKPKKENRWWINAIHKALTELSQNKGKRVILLPAMRTSITCPKCKYCDSKNRNGEKFNCLKCGIELNADIDVATENLATVAITAQSMPKPTCERSGDAKKPVRARKAKAPEFHDKLAPSYTVVLREAVKRPAATKKAGQAKKKKEFGGPSSGAPPPSGGSPAGSPTSTEEGTSESATPESGPGTSTEPSEGSAPGSPAGSMGPMEIYKTVSAWKRQPVRVLSLFRNIDKVLKSLGFLESGSGSGGGTLKYVEDVTNVVRRDVEKWGPFDLVYGSTQPLGSSCDRCPGWYMFQFHRILQYALPRQESQRPFFWIFMDNLLLTEDDQETTTRFLQTEAVTLQDVRGRDYQNAMRVWSNIPGLKSKHAPLTPKEEEYLQAQVRSRSKLDAPKVDLLVKNCLLPLREYFKYFSQNSLPLGSPAGSPTSTEEGTSESATPMEDEYVVEKVLDRRVVKGQVEYLLKWEGFSEEHNTWEPEKNLDCPELISEFMKKYKKMKEGENSRSSGGGSGGSGSMNNSQGRVTFEDVTVNFTQGEWQRLNPEQRNLYRDVMLENYSNLVSVGQGETTKPDVILRLEQGKEPWLEEEEVLGSGRAEKNGDIGGQIWKPKDVKESL

SEQ ID NO: 3026 - RNA, 56 nt, synthetic construct
  source 1..56: mol_type = other RNA
ctttcaagactaatagattgctccttacgaggagacgtcagcgcttctgcccgccc

SEQ ID NO: 3027 - RNA, 56 nt, synthetic construct
  source 1..56: mol_type = other RNA
ctttcaagactaatagattgctccttacgaggagactcctcggctctccgccccca

SEQ ID NO: 3028 - RNA, 56 nt, synthetic construct
  source 1..56: mol_type = other RNA
ctttcaagactaatagattgctccttacgaggagacggccccttctggtcgtcgcc

SEQ ID NO: 3029 - RNA, 56 nt, synthetic construct
  source 1..56: mol_type = other RNA
ctttcaagactaatagattgctccttacgaggagaccgcgtcgcggcgctcggtcg

SEQ ID NO: 3030 - RNA, 56 nt, synthetic construct
  source 1..56: mol_type = other RNA
ctttcaagactaatagattgctccttacgaggagacaaggcaaggcgtgagggagc

SEQ ID NO: 3031 - RNA, 56 nt, synthetic construct
  source 1..56: mol_type = other RNA
ctttcaagactaatagattgctccttacgaggagacccaccctcgtgagcggagaa

SEQ ID NO: 3032 - RNA, 56 nt, synthetic construct
  source 1..56: mol_type = other RNA
ctttcaagactaatagattgctccttacgaggagactccgctcacgagggtggaaa

SEQ ID NO: 3033 - RNA, 56 nt, synthetic construct
  source 1..56: mol_type = other RNA
ctttcaagactaatagattgctccttacgaggagacgcgggtttgcctcccactcc

SEQ ID NO: 3034 - RNA, 107 nt, synthetic construct
  source 1..107: mol_type = other RNA
gctcctccttctccttctcctgtttaagagctatgctggaaacagcatagcaagtttaaataaggctagtccgttatcaacttgaaaaagtggcaccgagtcggtgc

SEQ ID NO: 3035 - RNA, 56 nt, synthetic construct
  source 1..56: mol_type = other RNA
ctttcaagactaatagattgctccttacgaggagacctgaggccggcgggcggcgc

SEQ ID NO: 3036 - RNA, 56 nt, synthetic construct
  source 1..56: mol_type = other RNA
ctttcaagactaatagattgctccttacgaggagacgccggcgcgcgccctcgcag

SEQ ID NO: 3037 - RNA, 56 nt, synthetic construct
  source 1..56: mol_type = other RNA
ctttcaagactaatagattgctccttacgaggagacgtgccggagctggtgggtgg

SEQ ID NO: 3038 - RNA, 56 nt, synthetic construct
  source 1..56: mol_type = other RNA
ctttcaagactaatagattgctccttacgaggagactgccgccgccaccacagcca

SEQ ID NO: 3039 - RNA, 56 nt, synthetic construct
  source 1..56: mol_type = other RNA
ctttcaagactaatagattgctccttacgaggagactcctcctccgctgtcctctc

SEQ ID NO: 3040 - RNA, 56 nt, synthetic construct
  source 1..56: mol_type = other RNA
ctttcaagactaatagattgctccttacgaggagaccctgatagtcgacagaggcg

SEQ ID NO: 3041 - RNA, 56 nt, synthetic construct
  source 1..56: mol_type = other RNA
ctttcaagactaatagattgctccttacgaggagacggagccgcggcgcttacctg

SEQ ID NO: 3042 - RNA, 56 nt, synthetic construct
  source 1..56: mol_type = other RNA
ctttcaagactaatagattgctccttacgaggagacgtgcgccgggcatcggtcgg

SEQ ID NO: 3043 - RNA, 106 nt, synthetic construct
  source 1..106: mol_type = other RNA
gcgaagagggcgcgttcctggtttaagagctatgctggaaacagcatagcaagtttaaataaggctagtccgttatcaacttgaaaaagtggcaccgagtcggtgc

SEQ ID NO: 3044 - RNA, 56 nt, synthetic construct
  source 1..56: mol_type = other RNA
ctttcaagactaatagattgctccttacgaggagacataaaaacacgctccgagcg

SEQ ID NO: 3045 - RNA, 56 nt, synthetic construct
  source 1..56: mol_type = other RNA
ctttcaagactaatagattgctccttacgaggagactataaaagtccggccgcggc

SEQ ID NO: 3046 - RNA, 56 nt, synthetic construct
  source 1..56: mol_type = other RNA
ctttcaagactaatagattgctccttacgaggagacctggccgcggccggactttt

SEQ ID NO: 3047 - RNA, 56 nt, synthetic construct
  source 1..56: mol_type = other RNA
ctttcaagactaatagattgctccttacgaggagacttggctgcggcagcaggtag

SEQ ID NO: 3048 - RNA, 56 nt, synthetic construct
  source 1..56: mol_type = other RNA
ctttcaagactaatagattgctccttacgaggagacctacctgctgccgcagccaa

SEQ ID NO: 3049 - RNA, 56 nt, synthetic construct
  source 1..56: mol_type = other RNA
ctttcaagactaatagattgctccttacgaggagacccatggaggggatcagtgta

SEQ ID NO: 3050 - RNA, 56 nt, synthetic construct
  source 1..56: mol_type = other RNA
ctttcaagactaatagattgctccttacgaggagacaacttagagcgcagcccctc

SEQ ID NO: 3051 - RNA, 56 nt, synthetic construct
  source 1..56: mol_type = other RNA
ctttcaagactaatagattgctccttacgaggagacggagtacgggtacctccaat

SEQ ID NO: 3052 - RNA, 108 nt, synthetic construct
  source 1..108: mol_type = other RNA
gcaggtagcaaagtgacgccgagtttaagagctatgctggaaacagcatagcaagtttaaataaggctagtccgttatcaacttgaaaaagtggcaccgagtcggtgc

SEQ ID NO: 3053 - RNA, 56 nt, synthetic construct
  source 1..56: mol_type = other RNA
ctttcaagactaatagattgctccttacgaggagaccgtggcaacggaaaagcgcg

SEQ ID NO: 3054 - RNA, 56 nt, synthetic construct
  source 1..56: mol_type = other RNA
ctttcaagactaatagattgctccttacgaggagacatttatctgtaattcccgcg

SEQ ID NO: 3055 - RNA, 56 nt, synthetic construct
  source 1..56: mol_type = other RNA
ctttcaagactaatagattgctccttacgaggagacaaactgcgactgcgcggcgt

SEQ ID NO: 3056 - RNA, 56 nt, synthetic construct
  source 1..56: mol_type = other RNA
ctttcaagactaatagattgctccttacgaggagacctggacgggggacaggctgt

SEQ ID NO: 3057 - RNA, 56 nt, synthetic construct
  source 1..56: mol_type = other RNA
ctttcaagactaatagattgctccttacgaggagactcagataactgggcccctgc

SEQ ID NO: 3058 - RNA, 56 nt, synthetic construct
  source 1..56: mol_type = other RNA
ctttcaagactaatagattgctccttacgaggagaccccagagcagagggtgaagg

SEQ ID NO: 3059 - RNA, 56 nt, synthetic construct
  source 1..56: mol_type = other RNA
ctttcaagactaatagattgctccttacgaggagacccgggactctactaccttta

SEQ ID NO: 3060 - RNA, 56 nt, synthetic construct
  source 1..56: mol_type = other RNA
ctttcaagactaatagattgctccttacgaggagaccgaagctgacagatgggtat

SEQ ID NO: 3061 - RNA, 107 nt, synthetic construct
  source 1..107: mol_type = other RNA
ggctcgctgagacttcctggagtttaagagctatgctggaaacagcatagcaagtttaaataaggctagtccgttatcaacttgaaaaagtggcaccgagtcggtgc
